United States Patent Application Publication US 2024/0182876 A1 - sequence listing, part 3

SEQ ID NO: 4234 - protein, 529 aa, synthetic construct
  REGION 1..529: note = Variant of terminal deoxynucleotidyltransferase
MHHHHHHGGSGSHGIRTIDSDFGKKQQKKGDNHDSSATYEIKFHEFVLFILEEKMGATRRTFLTDLARKKGFRVENELTDEVTHIVAENLSRSEVLAWLKEHKMEKTKQFELLDISWLIESMKVGKPVDTKGKYQLAESVEVSANPDPTEGRVNELPPTMKTVSPYACQRRTTLNNRNQRFTDSLEILRENYELKGNDDTALEFRRAISVLKSLPFEVRSLKDTEGLPWISDEVKGIMEEIIEVGESREVQAVLNDEWYQSFHAFTRVFGVGVKTADKWYRMGLRTLEDVRSSKTLKLTPMQKVGLLYYEDLARGVTRAEADAIWLLVQDAVATFDPDAIVEIVGGFRRGKPQGHDVDLLISSPGAEKEQEDQLLQKVMNLWKKQGLLLCGRLEWSQWEDGGSPSGKADEGDAEASCFLILKLYDHLVHKSKRNMPTGSNMGESKPWKAIKVDLLRCPYGSFAFAMLQWTGSRMFRRDLRWYALEEKNMMLDNHSLYDMTRGIFLPAKSEEEIFEHLGLEYLEPFERNA

SEQ ID NO: 4235 - DNA, 1587 bp, synthetic construct
  misc_feature 1..1587: note = Variant of terminal deoxynucleotidyltransferase
  source 1..1587: mol_type = other DNA
atgcaccatcatcatcatcatggcggtagcggcagccacggcattcgtaccatcgattcggacttcgggaagaaacagcagaaaaaaggcgataaccacgatagttccgccacttatgaaatcaaatttcacgagtttgtgctgttcattctcgaagaaaaaatgggtgcgacgcgtcgtacttttctgacagatttagcccgcaagaaagggttccgcgtcgagaatgaactgaccgacgaagttacccacatcgtggcagaaaatctgtcacgctctgaagtattggcttggctgaaagaacacaagatggagaagaccaagcaattcgaactgctggatattagctggcttatcgaaagcatgaaagttggtaaaccggtggacaccaaggggaaataccagttggcggaatcggttgaggtgagtgcgaacccagatccgacagaaggtcgtgtaaacgagctgcctcctactatgaaaaccgtttctccgtatgcgtgtcaacgccgcaccaccctgaacaaccgtaatcaacgttttacggactcgctggagattcttcgtgaaaattacgagctgaaaggcaacgattggactgcgctggaatttcgtcgtgctatctccgtgctgaaaagccttccgtttgaggtacgtagcctgaaagacacggaaggattgccctggatcagtgatgaagtcaaagggattatggaagaaatcatcgaagtcggggagtcgcgtgaagtgcaggccgtgctcaatgatgagtggtatcaaagcttccacgcatttacgcgtgtctttggagtgggggtgaagacagcagacaagtggtaccgtatgggtctgcgcaccctcgaggatgttcgttccagcaagaccctgaagttgaccccgatgcagaaagtaggtctgctgtattatgaagatcttgctcgcggcgttacgcgtgccgaagctgacgcgatttggctgctggttcaggatgcagtcgcaactttcgacccggatgcgatcgtggagattgtcggtggatttcgtcgtgggaaacctcagggtcacgacgttgatctgcttatcagttctccgggagctgagaaagagcaagaagaccaactcctgcagaaagtgatgaatctgtggaagaaacaagggttgttgctgtgtggtcgtctggaatggagtcagtgggaagatgggggttcgccttccggtaaggctgatgagggtgacgcggaggcgtcgtgctttctgatcctcaaactttatgatcatctggtgcgtaaaagtaaacgcaatatgccgactggttcgaacatgggcgagtccaaaccgtggaaagcaattaaagtagatctgctgcgttgcccctatggcagttttgcgtttgcgatgttgcagtggaccggaagccgcatgttccgtcgtgatctgcgctggtacgccctggaagagaagaacatgatgctggacaatcattcgctgtatgacatgacccgcggtatcttcctccctgctaaatcggaagaggaaattttcgaacatctggggcttgaatacctggaaccgttcgaacgtaacgca

SEQ ID NO: 4236 - protein, 529 aa, synthetic construct
  REGION 1..529: note = Variant of terminal deoxynucleotidyltransferase
MHHHHHHGGSGSHGIRTIDSDFGKKQQKKGDNHDSSATYEIKFHEFVLFILEEKMGATRRTFLTDLARKKGFRVENELTDEVTHIVAENLSRSEVLAWLKEHKMEKTKQFELLDISWLIESMKVGKPVDTKGKYQLAESVEVSANPDPTEGRVNELPPTMKTVSPYACQRRTTLNNRNQRFTDSLEILRENYELKGNDWTALEFRRAISVLKSLPFEVRSLKDTEGLPWISDEVKGIMEEIIEVGESREVQAVLNDEWYQSFHAFTRVFGVGVKTADKWYRMGLRTLEDVRSSKTLKLTPMQKVGLLYYEDLARGVTRAEADAIWLLVQDAVATFDPDAIVEIVGGFRRGKPQGHDVDLLISSPGAEKEQEDQLLQKVMNLWKKQGLLLCGRLEWSQWEDGGSPSGKADEGDAEASCFLILKLYDHLVRKSKRNMPTGSNMGESKPWKAIKVDLLRCPYGSFAFAMLQWTGSRMFRRDLRWYALEEKNMMLDNHSLYDMTRGIFLPAKSEEEIFEHLGLEYLEPFERNA

SEQ ID NO: 4237 - DNA, 1587 bp, synthetic construct
  misc_feature 1..1587: note = Variant of terminal deoxynucleotidyltransferase
  source 1..1587: mol_type = other DNA
atgcaccatcatcatcatcatggcggtagcggcagccacggcattcgtaccatcgattcggacttcgggaagaaacagcagaaaaaaggcgataaccacgatagttccgccacttatgaaatcaaatttcacgagtttgtgctgttcattctcgaagaaaaaatgggtgcgacgcgtcgtacttttctgacagatttagcccgcaagaaagggttccgcgtcgagaatgaactgaccgacgaagttacccacatcgtggcagaaaatctgtcacgctctgaagtattggcttggctgaaagaacacaagatggagaagaccaagcaattcgaactgctggatattagctggcttatcgaaagcatgaaagttggtaaaccggtggacaccaaggggaaataccagttggcggaatcggttgaggtgagtgcgaacccagatccgacagaaggtcgtgtaaacgagctgcctcctactatgaaaaccgtttctccgtatgcgtgtcaacgccgcaccaccctgaacaaccgtaatcaacgttttacggactcgctggagattcttcgtgaaaattacgagctgaaaggcaacgacgatactgcgctggaatttcgtcgtgctatctccgtgctgaaaagccttccgtttgaggtacgtagcctgaaagacacggaaggattgccctggatcagtgatgaagtcaaagggattatggaagaaatcatcgaagtcggggagtcgcgtgaagtgcaggccgtgctcaatgatgagtggtatcaaagcttccacgcatttacgcgtgtctttggagtgggggtgaagacagcagacaagtggtaccgtatgggtctgcgcaccctcgaggatgttcgttccagcaagaccctgaagttgaccccgatgcagaaagtaggtctgctgtattatgaagatcttgctcgcggcgttacgcgtgccgaagctgacgcgatttggctgctggttcaggatgcagtcgcaactttcgacccggatgcgatcgtggagattgtcggtggatttcgtcgtgggaaacctcagggtcacgacgttgatctgcttatcagttctccgggagctgagaaagagcaagaagaccaactcctgcagaaagtgatgaatctgtggaagaaacaagggttgttgctgtgtggtcgtctggaatggagtcagtgggaagatgggggtgttccttccggtaaggctgatgagggtgacgcggaggcgtcgtgctttctgatcctcaaactttatgatcatctggtgcgtaaaagtaaacgcaatatgccgactggttcgaacatgggcgagtccaaaccgtggaaagcaattaaagtagatctgctgcgttgcccctatggcagttttgcgtttgcgatgttgcagtggaccggaagccgcatgttccgtcgtgatctgcgctggtacgccctggaagagaagaacatgatgctggacaatcattcgctgtatgacatgacccgcggtatcttcctccctgctaaatcggaagaggaaattttcgaacatctggggcttgaatacctggaaccgttcgaacgtaacgca

SEQ ID NO: 4238 - protein, 529 aa, synthetic construct
  REGION 1..529: note = Variant of terminal deoxynucleotidyltransferase
MHHHHHHGGSGSHGIRTIDSDFGKKQQKKGDNHDSSATYEIKFHEFVLFILEEKMGATRRTFLTDLARKKGFRVENELTDEVTHIVAENLSRSEVLAWLKEHKMEKTKQFELLDISWLIESMKVGKPVDTKGKYQLAESVEVSANPDPTEGRVNELPPTMKTVSPYACQRRTTLNNRNQRFTDSLEILRENYELKGNDDTALEFRRAISVLKSLPFEVRSLKDTEGLPWISDEVKGIMEEIIEVGESREVQAVLNDEWYQSFHAFTRVFGVGVKTADKWYRMGLRTLEDVRSSKTLKLTPMQKVGLLYYEDLARGVTRAEADAIWLLVQDAVATFDPDAIVEIVGGFRRGKPQGHDVDLLISSPGAEKEQEDQLLQKVMNLWKKQGLLLCGRLEWSQWEDGGVPSGKADEGDAEASCFLILKLYDHLVRKSKRNMPTGSNMGESKPWKAIKVDLLRCPYGSFAFAMLQWTGSRMFRRDLRWYALEEKNMMLDNHSLYDMTRGIFLPAKSEEEIFEHLGLEYLEPFERNA

SEQ ID NO: 4239 - DNA, 1587 bp, synthetic construct
  misc_feature 1..1587: note = Variant of terminal deoxynucleotidyltransferase
  source 1..1587: mol_type = other DNA
atgcaccatcatcatcatcatggcggtagcggcagccacggcattcgtaccatcgattcggacttcgggaagaaacagcagaaaaaaggcgataaccacgatagttccgccacttatgaaatcaaatttcacgagtttgtgctgttcattctcgaagaaaaaatgggtgcgacgcgtcgtacttttctgacagatttagcccgcaagaaagggttccgcgtcgagaatgaactgaccgacgaagttacccacatcgtggcagaaaatctgtcacgctctgaagtattggcttggctgaaagaacacaagatggagaagaccaagcaattcgaactgctggatattagctggcttatcgaaagcatgaaagttggtaaaccggtggacaccaaggggaaataccagttggcggaatcggttgaggtgagtgcgaacccagatccgacagaaggtcgtgtaaacgagctgcctcctactatgaaaaccgtttctccgtatgcgtgtcaacgccgcaccaccctgaacaaccgtaatcaacgttttacggactcgctggagattcttcgtgaaaattacgagctgaaaggcaacgattctactgcgctggaatttcgtcgtgctatctccgtgctgaaaagccttccgtttgaggtacgtagcctgaaagacacggaaggattgccctggatcagtgatgaagtcaaagggattatggaagaaatcatcgaagtcggggagtcgcgtgaagtgcaggccgtgctcaatgatgagtggtatcaaagcttccacgcatttacgcgtgtctttggagtgggggtgaagacagcagacaagtggtaccgtatgggtctgcgcaccctcgaggatgttcgttccagcaagaccctgaagttgaccccgatgcagaaagtaggtctgctgtattatgaagatcttgctcgcggcgttacgcgtgccgaagctgacgcgatttggctgctggttcaggatgcagtcgcaactttcgacccggatgcgatcgtggagattgtcggtggatttcgtcgtgggaaacctcagggtcacgacgttgatctgcttatcagttctccgggagctgagaaagagcaagaagaccaactcctgcagaaagtgatgaatctgtggaagaaacaagggttgttgctgtgtggtcgtctggaatggagtcagtgggaagatgggggttcgccttccggtaaggctgatgagggtgacgcggaggcgtcgtgctttctgatcctcaaactttatgatcatctggtgcgtaaaagtaaacgcaatatgccgactggttcgaacatgggcgagtccaaaccgtggaaagcaattaaagtagatctgctgcgttgcccctatggcagttttgcgtttgcgatgttgcagtggaccggaagccgcatgttccgtcgtgatctgcgctggtacgccctggaagagaagaacatgatgctggacaatcattcgctgtatgacatgacccgcggtatcttcctccctgctaaatcggaagaggaaattttcgaacatctggggcttgaatacctggaaccgttcgaacgtaacgca

SEQ ID NO: 4240 - protein, 529 aa, synthetic construct
  REGION 1..529: note = Variant of terminal deoxynucleotidyltransferase
MHHHHHHGGSGSHGIRTIDSDFGKKQQKKGDNHDSSATYEIKFHEFVLFILEEKMGATRRTFLTDLARKKGFRVENELTDEVTHIVAENLSRSEVLAWLKEHKMEKTKQFELLDISWLIESMKVGKPVDTKGKYQLAESVEVSANPDPTEGRVNELPPTMKTVSPYACQRRTTLNNRNQRFTDSLEILRENYELKGNDSTALEFRRAISVLKSLPFEVRSLKDTEGLPWISDEVKGIMEEIIEVGESREVQAVLNDEWYQSFHAFTRVFGVGVKTADKWYRMGLRTLEDVRSSKTLKLTPMQKVGLLYYEDLARGVTRAEADAIWLLVQDAVATFDPDAIVEIVGGFRRGKPQGHDVDLLISSPGAEKEQEDQLLQKVMNLWKKQGLLLCGRLEWSQWEDGGSPSGKADEGDAEASCFLILKLYDHLVRKSKRNMPTGSNMGESKPWKAIKVDLLRCPYGSFAFAMLQWTGSRMFRRDLRWYALEEKNMMLDNHSLYDMTRGIFLPAKSEEEIFEHLGLEYLEPFERNA

SEQ ID NO: 4241 - DNA, 1587 bp, synthetic construct
  misc_feature 1..1587: note = Variant of terminal deoxynucleotidyltransferase
  source 1..1587: mol_type = other DNA
atgcaccatcatcatcatcatggcggtagcggcagccacggcattcgtaccatcgattcggacttcgggaagaaacagcagaaaaaaggcgataaccacgatagttccgccacttatgaaatcaaatttcacgagtttgtgctgttcattctcgaagaaaaaatgggtgcgacgcgtcgtacttttctgacagatttagcccgcaagaaagggttccgcgtcgagaatgaactgaccgacgaagttacccacatcgtggcagaaaatctgtcacgctctgaagtattggcttggctgaaagaacacaagatggagaagaccaagcaattcgaactgctggatattagctggcttatcgaaagcatgaaagttggtaaaccggtggacaccaaggggaaataccagttggcggaatcggttgaggtgagtgcgaacccagatccgacagaaggtcgtgtaaacgagctgcctcctactatgaaaaccgtttctccgtatgcgtgtcaacgccgcaccaccctgaacaaccgtaatcaacgttttacggactcgctggagattcttcgtgaaaattacgagctgaaaggcaacgacgatactgcgctggaatttcgtcgtgctatctccgtgctgaaaagccttccgtttgaggtacgtagcctgaaagacacggaaggattgccctggatcagtgatgaagtcaaagggattatggaagaaatcatcgaagtcggggagtcgcgtgaagtgcaggccgtgctcaatgatgagtggtatcaaagcttccacgcatttacgcgtgtctttggagtgggggtgaagacagcagacaagtggtaccgtatgggtctgcgcaccctcgaggatgttcgttcctgtaagaccctgaagttgaccccgatgcagaaagtaggtctgctgtattatgaagatcttgctcgcggcgttacgcgtgccgaagctgacgcgatttggctgctggttcaggatgcagtcgcaactttcgacccggatgcgatcgtggagattgtcggtggatttcgtcgtgggaaacctcagggtcacgacgttgatctgcttatcagttctccgggagctgagaaagagcaagaagaccaactcctgcagaaagtgatgaatctgtggaagaaacaagggttgttgctgtgtggtcgtctggaatggagtcagtgggaagatgggggttcgccttccggtaaggctgatgagggtgacgcggaggcgtcgtgctttctgatcctcaaactttatgatcatctggtgcgtaaaagtaaacgcaatatgccgactggttcgaacatgggcgagtccaaaccgtggaaagcaattaaagtagatctgctgcgttgcccctatggcagttttgcgtttgcgatgttgcagtggaccggaagccgcatgttccgtcgtgatctgcgctggtacgccctggaagagaagaacatgatgctggacaatcattcgctgtatgacatgacccgcggtatcttcctccctgctaaatcggaagaggaaattttcgaacatctggggcttgaatacctggaaccgttcgaacgtaacgca

SEQ ID NO: 4242 - protein, 529 aa, synthetic construct
  REGION 1..529: note = Variant of terminal deoxynucleotidyltransferase
MHHHHHHGGSGSHGIRTIDSDFGKKQQKKGDNHDSSATYEIKFHEFVLFILEEKMGATRRTFLTDLARKKGFRVENELTDEVTHIVAENLSRSEVLAWLKEHKMEKTKQFELLDISWLIESMKVGKPVDTKGKYQLAESVEVSANPDPTEGRVNELPPTMKTVSPYACQRRTTLNNRNQRFTDSLEILRENYELKGNDDTALEFRRAISVLKSLPFEVRSLKDTEGLPWISDEVKGIMEEIIEVGESREVQAVLNDEWYQSFHAFTRVFGVGVKTADKWYRMGLRTLEDVRSCKTLKLTPMQKVGLLYYEDLARGVTRAEADAIWLLVQDAVATFDPDAIVEIVGGFRRGKPQGHDVDLLISSPGAEKEQEDQLLQKVMNLWKKQGLLLCGRLEWSQWEDGGSPSGKADEGDAEASCFLILKLYDHLVRKSKRNMPTGSNMGESKPWKAIKVDLLRCPYGSFAFAMLQWTGSRMFRRDLRWYALEEKNMMLDNHSLYDMTRGIFLPAKSEEEIFEHLGLEYLEPFERNA

SEQ ID NO: 4243 - DNA, 1587 bp, synthetic construct
  misc_feature 1..1587: note = Variant of terminal deoxynucleotidyltransferase
  source 1..1587: mol_type = other DNA
atgcaccatcatcatcatcatggcggtagcggcagccacggcattcgtaccatcgattcggacttcgggaagaaacagcagaaaaaaggcgataaccacgatagttccgccacttatgaaatcaaatttcacgagtttgtgctgttcattctcgaagaaaaaatgggtgcgacgcgtcgtacttttctgacagatttagcccgcaagaaagggttccgcgtcgagaatgaactgaccgacgaagttacccacatcgtggcagaaaatctgtcacgctctgaagtattggcttggctgaaagaacacaagatggagaagaccaagcaattcgaactgctggatattagctggcttatcgaaagcatgaaagttggtaaaccggtggacaccaaggggaaataccagttggcggaatcggttgaggtgagtgcgaacccagatccgacagaaggtcgtgtaaacgagctgcctcctactatgaaaaccgtttctccgtatgcgtgtcaacgccgcaccaccctgaacaaccgtaatcaacgttttacggactcgctggagattcttcgtgaaaattacgagctgaaaggcaacgacgatactgcgttggaatttcgtcgtgctatctccgtgctgaaaagccttccgtttgaggtacgtagcctgaaagacacggaaggattgccctggatcagtgatgaagtcaaagggattatggaagaaatcatcgaagtcggggagtcgcgtgaagtgcaggccgtgctcaatgatgagtggtatcaaagcttccacgcatttacgcgtgtctttggagtgggggtgaagacagcagacaagtggtaccgtatgggtctgcgcaccctcgaggatgttcgttccagcaagaccctgaagttgaccccgatgcagaaagtaggtctgctgtattatgaagatcttgctcgcggcgttacgcgtgccgaagctgacgcgatttggctgctggttcaggatgcagtcgcaactttcgacccggatgcgatcgtggagattgtcggtggatttcgtcgtgggaaacctcagggtcacgacgttgatctgcttatcagttctccgggagctgagaaagagcaagaagaccaactcctgcagaaagtgatgaatctgtggaagaaacaagggttgttgctgtgtggtcgtctggaatggagtcagtggtctgatgggggttcgccttccggtaaggctgatgagggtgacgcggaggcgtcgtgctttctgatcctcaaactttatgatcatctggtgcgtaaaagtaaacgcaatatgccgactggttcgaacatgggcgagtccaaaccgtggaaagcaattaaagtagatctgctgcgttgcccctatggcagttttgcgtttgcgatgttgcagtggaccggaagccgcatgttccgtcgtgatctgcgctggtacgccctggaagagaagaacatgatgctggacaatcattcgctgtatgacatgacccgcggtatcttcctccctgctaaatcggaagaggaaattttcgaacatctggggcttgaatacctggaaccgttcgaacgtaacgca

SEQ ID NO: 4244 - protein, 529 aa, synthetic construct
  REGION 1..529: note = Variant of terminal deoxynucleotidyltransferase
MHHHHHHGGSGSHGIRTIDSDFGKKQQKKGDNHDSSATYEIKFHEFVLFILEEKMGATRRTFLTDLARKKGFRVENELTDEVTHIVAENLSRSEVLAWLKEHKMEKTKQFELLDISWLIESMKVGKPVDTKGKYQLAESVEVSANPDPTEGRVNELPPTMKTVSPYACQRRTTLNNRNQRFTDSLEILRENYELKGNDDTALEFRRAISVLKSLPFEVRSLKDTEGLPWISDEVKGIMEEIIEVGESREVQAVLNDEWYQSFHAFTRVFGVGVKTADKWYRMGLRTLEDVRSSKTLKLTPMQKVGLLYYEDLARGVTRAEADAIWLLVQDAVATFDPDAIVEIVGGFRRGKPQGHDVDLLISSPGAEKEQEDQLLQKVMNLWKKQGLLLCGRLEWSQWSDGGSPSGKADEGDAEASCFLILKLYDHLVRKSKRNMPTGSNMGESKPWKAIKVDLLRCPYGSFAFAMLQWTGSRMFRRDLRWYALEEKNMMLDNHSLYDMTRGIFLPAKSEEEIFEHLGLEYLEPFERNA

SEQ ID NO: 4245 - DNA, 1587 bp, synthetic construct
  misc_feature 1..1587: note = Variant of terminal deoxynucleotidyltransferase
  source 1..1587: mol_type = other DNA
atgcaccatcatcatcatcatggcggtagcggcagccacggcattcgtaccatcgattcggacttcgggaagaaacagcagaaaaaaggcgataaccacgatagttccgccacttatgaaatcaaatttcacgagtttgtgctgttcattctcgaagaaaaaatgggtgcgacgcgtcgtacttttctgacagatttagcccgcaagaaagggttccgcgtcgagaatgaactgaccgacgaagttacccacatcgtggcagaaaatctgtcacgctctgaagtattggcttggctgaaagaacacaagatggagaagaccaagcaattcgaactgctggatattagctggcttatcgaaagcatgaaagttggtaaaccggtggacaccaaggggaaataccagttggcggaatcggttgaggtgagtgcgaacccagatccgacagaaggtcgtgtaaacgagctgcctcctactatgaaaaccgtttctccgtatgcgtgtcaacgccgcaccaccctgaacaaccgtaatgttcgttttacggactcgctggagattcttcgtgaaaattacgagctgaaaggcaacgacgatactgcgctggaatttcgtcgtgctatctccgtgctgaaaagccttccgtttgaggtacgtagcctgaaagacacggaaggattgccctggatcagtgatgaagtcaaagggattatggaagaaatcatcgaagtcggggagtcgcgtgaagtgcaggccgtgctcaatgatgagtggtatcaaagcttccacgcatttacgcgtgtctttggagtgggggtgaagacagcagacaagtggtaccgtatgggtctgcgcaccctcgaggatgttcgttccagcaagaccctgaagttgaccccgatgcagaaagtaggtctgctgtattatgaagatcttgctcgcggcgttacgcgtgccgaagctgacgcgatttggctgctggttcaggatgcagtcgcaactttcgacccggatgcgatcgtggagattgtcggtggatttcgtcgtgggaaacctcagggtcacgacgttgatctgcttatcagttctccgggagctgagaaagagcaagaagaccaactcctgcagaaagtgatgaatctgtggaagaaacaagggttgttgctgtgtggtcgtctggaatggagtcagtgggaagatgggggttcgccttccggtaaggctgatgagggtgacgcggaggcgtcgtgctttctgatcctcaaactttatgatcatctggtgcgtaaaagtaaacgcaatatgccgactggttcgaacatgggcgagtccaaaccgtggaaagcaattaaagtagatctgctgcgttgcccctatggcagttttgcgtttgcgatgttgcagtggaccggaagccgcatgttccgtcgtgatctgcgctggtacgccctggaagagaagaacatgatgctggacaatcattcgctgtatgacatgacccgcggtatcttcctccctgctaaatcggaagaggaaattttcgaacatctggggcttgaatacctggaaccgttcgaacgtaacgca

SEQ ID NO: 4246 - protein, 529 aa, synthetic construct
  REGION 1..529: note = Variant of terminal deoxynucleotidyltransferase
MHHHHHHGGSGSHGIRTIDSDFGKKQQKKGDNHDSSATYEIKFHEFVLFILEEKMGATRRTFLTDLARKKGFRVENELTDEVTHIVAENLSRSEVLAWLKEHKMEKTKQFELLDISWLIESMKVGKPVDTKGKYQLAESVEVSANPDPTEGRVNELPPTMKTVSPYACQRRTTLNNRNVRFTDSLEILRENYELKGNDDTALEFRRAISVLKSLPFEVRSLKDTEGLPWISDEVKGIMEEIIEVGESREVQAVLNDEWYQSFHAFTRVFGVGVKTADKWYRMGLRTLEDVRSSKTLKLTPMQKVGLLYYEDLARGVTRAEADAIWLLVQDAVATFDPDAIVEIVGGFRRGKPQGHDVDLLISSPGAEKEQEDQLLQKVMNLWKKQGLLLCGRLEWSQWEDGGSPSGKADEGDAEASCFLILKLYDHLVRKSKRNMPTGSNMGESKPWKAIKVDLLRCPYGSFAFAMLQWTGSRMFRRDLRWYALEEKNMMLDNHSLYDMTRGIFLPAKSEEEIFEHLGLEYLEPFERNA

SEQ ID NO: 4247 - DNA, 1587 bp, synthetic construct
  misc_feature 1..1587: note = Variant of terminal deoxynucleotidyltransferase
  source 1..1587: mol_type = other DNA
atgcaccatcatcatcatcatggcggtagcggcagccacggcattcgtaccatcgattcggacttcgggaagaaacagcagaaaaaaggcgataaccacgatagttccgccacttatgaaatcaaatttcacgagtttgtgctgttcattctcgaagaaaaaatgggtgcgacgcgtcgtacttttctgacagatttagcccgcaagaaagggttccgcgtcgagaatgaactgaccgacgaagttacccacatcgtggcagaaaatctgtcacgctctgaagtattggcttggctgaaagaacacaagatggagaagaccaagcaattcgaactgctggatattagctggcttatcgaaagcatgaaagttggtaaaccggtggacaccaaggggaaataccagttggcggaatcggttgaggtgagtgcgaacccagatccgacagaaggtcgtgtaaacgagctgcctcctactatgaaaaccgtttctccgtatgcgtgtcaacgccgcaccaccctgaacaaccgtaatcaacgttttacggactcgctggagattcttcgtgaaaattacgagctgaaaggctttgatgatactgcgctggaatttcgtcgtgctatctccgtgctgaaaagccttccgtttgaggtacgtagcctgaaagacacggaaggattgccctggatcagtgatgaagtcaaagggattatggaagaaatcatcgaagtcggggagtcgcgtgaagtgcaggccgtgctcaatgatgagtggtatcaaagcttccacgcatttacgcgtgtctttggagtgggggtgaagacagcagacaagtggtaccgtatgggtctgcgcaccctcgaggatgttcgttccagcaagaccctgaagttgaccccgatgcagaaagtaggtctgctgtattatgaagatcttgctcgcggcgttacgcgtgccgaagctgacgcgatttggctgctggttcaggatgcagtcgcaactttcgacccggatgcgatcgtggagattgtcggtggatttcgtcgtgggaaacctcagggtcacgacgttgatctgcttatcagttctccgggagctgagaaagagcaagaagaccaactcctgcagaaagtgatgaatctgtggaagaaacaagggttgttgctgtgtggtcgtctggaatggagtcagtgggaagatgggggttcgccttccggtaaggctgatgagggtgacgcggaggcgtcgtgctttctgatcctcaaactttatgatcatctggtgcgtaaaagtaaacgcaatatgccgactggttcgaacatgggcgagtccaaaccgtggaaagcaattaaagtagatctgctgcgttgcccctatggcagttttgcgtttgcgatgttgcagtggaccggaagccgcatgttccgtcgtgatctgcgctggtacgccctggaagagaagaacatgatgctggacaatcattcgctgtatgacatgacccgcggtatcttcctccctgctaaatcggaagaggaaattttcgaacatctggggcttgaatacctggaaccgttcgaacgtaacgca

SEQ ID NO: 4248 - protein, 529 aa, synthetic construct
  REGION 1..529: note = Variant of terminal deoxynucleotidyltransferase
MHHHHHHGGSGSHGIRTIDSDFGKKQQKKGDNHDSSATYEIKFHEFVLFILEEKMGATRRTFLTDLARKKGFRVENELTDEVTHIVAENLSRSEVLAWLKEHKMEKTKQFELLDISWLIESMKVGKPVDTKGKYQLAESVEVSANPDPTEGRVNELPPTMKTVSPYACQRRTTLNNRNQRFTDSLEILRENYELKGFDDTALEFRRAISVLKSLPFEVRSLKDTEGLPWISDEVKGIMEEIIEVGESREVQAVLNDEWYQSFHAFTRVFGVGVKTADKWYRMGLRTLEDVRSSKTLKLTPMQKVGLLYYEDLARGVTRAEADAIWLLVQDAVATFDPDAIVEIVGGFRRGKPQGHDVDLLISSPGAEKEQEDQLLQKVMNLWKKQGLLLCGRLEWSQWEDGGSPSGKADEGDAEASCFLILKLYDHLVRKSKRNMPTGSNMGESKPWKAIKVDLLRCPYGSFAFAMLQWTGSRMFRRDLRWYALEEKNMMLDNHSLYDMTRGIFLPAKSEEEIFEHLGLEYLEPFERNA

SEQ ID NO: 4249 - DNA, 1587 bp, synthetic construct
  misc_feature 1..1587: note = Variant of terminal deoxynucleotidyltransferase
  source 1..1587: mol_type = other DNA
atgcaccatcatcatcatcatggcggtagcggcagccacggcattcgtaccatcgattcggacttcgggaagaaacagcagaaaaaaggcgataaccacgatagttccgccacttatgaaatcaaatttcacgagtttgtgctgttcattctcgaagaaaaaatgggtgcgacgcgtcgtacttttctgacagatttagcccgcaagaaagggttccgcgtcgagaatgaactgaccgacgaagttacccacatcgtggcagaaaatctgtcacgctctgaagtattggcttggctgaaagaacacaagatggagaagaccaagcaattcgaactgctggatattagctggcttatcgaaagcatgaaagttggtaaaccggtggacaccaaggggaaataccagttggcggaatcggttgaggtgagtgcgaacccagatccgacagaaggtcgtgtaaacgagctgcctcctactatgaaaaccgtttctccgtatgcgtgtcaacgccgcaccaccctgaacaaccgtaatcaacgttttacggactcgctggagattcttcgtgaaaattacgagctgaaaggcaacgacgatactgcgctggaatttcgtcgtgctatctccgtgctgaaaagccttccgtttgaggtacgtagcctgaaagacacggaaggattgccctggatcagtgatgaagtcaaagggattatggaagaaatcatcgaagtcggggagtcgcgtgaagtgcaggccgtgctcaatgatgagtggtatcaaagcttccacgcatttacgcgtgtctttggagtgggggtgaagacagcagacaagtggtaccgtatgggtctgcgcaccctcgaggatgttcgttccagcaagaccctgaagttgaccccgatgcagaaagtaggtctgctgtattatgaagatcttgctcgcggcgttacgcgtgccgaagctgacgcgatttggctgctggttcaggatgcagtcgcaactttcgacccggatgcgatcgtggagattgtcggtggatttcgtcgtgggaaacctcagggtcacgacgttgatctgcttatcagttctccgggagctgagaaagagcaagaagaccaactcctgcagaaagtgatgaatctgtggaagaaacaagggttgttgctgtgtggtcgtctggaatggagtcagtgggaagatgggggttcgccttccggtaaggctgatgagggtgacgcggaggcgtcgtgctttctgatcctcaaactttatgatcatctggtgcgtaaaagtaaacgcaatatgccgactggttcgaacatgggcgagtccaaaccgtggaaagcaattaaagtagatctgctgcgttgcccctatggcagttttgcgtttgcgatgttgcagtggaccggaagccgcatgttccgtcgtgatctgcagtggtacgccctggaagagaagaacatgatgctggacaatcattcgctgtatgacatgacccgcggtatcttcctccctgctaaatcggaagaggaaattttcgaacatctggggcttgaatacctggaaccgttcgaacgtaacgca

SEQ ID NO: 4250 - protein, 529 aa, synthetic construct
  REGION 1..529: note = Variant of terminal deoxynucleotidyltransferase
MHHHHHHGGSGSHGIRTIDSDFGKKQQKKGDNHDSSATYEIKFHEFVLFILEEKMGATRRTFLTDLARKKGFRVENELTDEVTHIVAENLSRSEVLAWLKEHKMEKTKQFELLDISWLIESMKVGKPVDTKGKYQLAESVEVSANPDPTEGRVNELPPTMKTVSPYACQRRTTLNNRNQRFTDSLEILRENYELKGNDDTALEFRRAISVLKSLPFEVRSLKDTEGLPWISDEVKGIMEEIIEVGESREVQAVLNDEWYQSFHAFTRVFGVGVKTADKWYRMGLRTLEDVRSSKTLKLTPMQKVGLLYYEDLARGVTRAEADAIWLLVQDAVATFDPDAIVEIVGGFRRGKPQGHDVDLLISSPGAEKEQEDQLLQKVMNLWKKQGLLLCGRLEWSQWEDGGSPSGKADEGDAEASCFLILKLYDHLVRKSKRNMPTGSNMGESKPWKAIKVDLLRCPYGSFAFAMLQWTGSRMFRRDLQWYALEEKNMMLDNHSLYDMTRGIFLPAKSEEEIFEHLGLEYLEPFERNA

SEQ ID NO: 4251 - DNA, 1587 bp, synthetic construct
  misc_feature 1..1587: note = Variant of terminal deoxynucleotidyltransferase
  source 1..1587: mol_type = other DNA
atgcaccatcatcatcatcatggcggtagcggcagccacggcattcgtaccatcgattcggacttcgggaagaaacagcagaaaaaaggcgataaccacgatagttccgccacttatgaaatcaaatttcacgagtttgtgctgttcattctcgaagaaaaaatgggtgcgacgcgtcgtacttttctgacagatttagcccgcaagaaagggttccgcgtcgagaatgaactgaccgacgaagttacccacatcgtggcagaaaatctgtcacgctctgaagtattggcttggctgaaagaacacaagatggagaagaccaagcaattcgaactgctggatattagctggcttatcgaaagcatgaaagttggtaaaccggtggacaccaaggggaaataccagttggcggaatcggttgaggtgagtgcgaacccagatccgacagaaggtcgtgtaaacgagctgcctcctactatgaaaaccgtttctccgtatgcgtgtcaacgccgcaccaccctgaacaaccgtaatcaacgttttacggactcgctggagattcttcgtgaattttacgagctgaaaggcaacgacgatactgcgctggaatttcgtcgtgctatctccgtgctgaaaagccttccgtttgaggtacgtagcctgaaagacacggaaggattgccctggatcagtgatgaagtcaaagggattatggaagaaatcatcgaagtcggggagtcgcgtgaagtgcaggccgtgctcaatgatgagtggtatcaaagcttccacgcatttacgcgtgtctttggagtgggggtgaagacagcagacaagtggtaccgtatgggtctgcgcaccctcgaggatgttcgttccagcaagaccctgaagttgaccccgatgcagaaagtaggtctgctgtattatgaagatcttgctcgcggcgttacgcgtgccgaagctgacgcgatttggctgctggttcaggatgcagtcgcaactttcgacccggatgcgatcgtggagattgtcggtggatttcgtcgtgggaaacctcagggtcacgacgttgatctgcttatcagttctccgggagctgagaaagagcaagaagaccaactcctgcagaaagtgatgaatctgtggaagaaacaagggttgttgctgtgtggtcgtctggaatggagtcagtgggaagatgggggttcgccttccggtaaggctgatgagggtgacgcggaggcgtcgtgctttctgatcctcaaactttatgatcatctggtgcgtaaaagtaaacgcaatatgccgactggttcgaacatgggcgagtccaaaccgtggaaagcaattaaagtagatctgctgcgttgcccctatggcagttttgcgtttgcgatgttgcagtggaccggaagccgcatgttccgtcgtgatctgcgctggtacgccctggaagagaagaacatgatgctggacaatcattcgctgtatgacatgacccgcggtatcttcctccctgctaaatcggaagaggaaattttcgaacatctggggcttgaatacctggaaccgttcgaacgtaacgca

SEQ ID NO: 4252 - protein, 529 aa, synthetic construct
  REGION 1..529: note = Variant of terminal deoxynucleotidyltransferase
MHHHHHHGGSGSHGIRTIDSDFGKKQQKKGDNHDSSATYEIKFHEFVLFILEEKMGATRRTFLTDLARKKGFRVENELTDEVTHIVAENLSRSEVLAWLKEHKMEKTKQFELLDISWLIESMKVGKPVDTKGKYQLAESVEVSANPDPTEGRVNELPPTMKTVSPYACQRRTTLNNRNQRFTDSLEILREFYELKGNDDTALEFRRAISVLKSLPFEVRSLKDTEGLPWISDEVKGIMEEIIEVGESREVQAVLNDEWYQSFHAFTRVFGVGVKTADKWYRMGLRTLEDVRSSKTLKLTPMQKVGLLYYEDLARGVTRAEADAIWLLVQDAVATFDPDAIVEIVGGFRRGKPQGHDVDLLISSPGAEKEQEDQLLQKVMNLWKKQGLLLCGRLEWSQWEDGGSPSGKADEGDAEASCFLILKLYDHLVRKSKRNMPTGSNMGESKPWKAIKVDLLRCPYGSFAFAMLQWTGSRMFRRDLRWYALEEKNMMLDNHSLYDMTRGIFLPAKSEEEIFEHLGLEYLEPFERNA

SEQ ID NO: 4253 - DNA, 1587 bp, synthetic construct
  misc_feature 1..1587: note = Variant of terminal deoxynucleotidyltransferase
  source 1..1587: mol_type = other DNA
atgcaccatcatcatcatcatggcggtagcggcagccacggcattcgtaccatcgattcggacttcgggaagaaacagcagaaaaaaggcgataaccacgatagttccgccacttatgaaatcaaatttcacgagtttgtgctgttcattctcgaagaaaaaatgggtgcgacgcgtcgtacttttctgacagatttagcccgcaagaaagggttccgcgtcgagaatgaactgaccgacgaagttacccacatcgtggcagaaaatctgtcacgctctgaagtattggcttggctgaaagaacacaagatggagaagaccaagcaattcgaactgctggatattagctggcttatcgaaagcatgaaagttggtaaaccggtggacaccaaggggaaataccagttggcggaatcggttgaggtgagtgcgaacccagatccgacagaaggtcgtgtaaacgagctgcctcctactatgaaaaccgtttctccgtatgcgtgtcaacgccgcaccaccctgaacaaccgtaatcaacgttttacggactcgctggagattcttcgtgaaaattacgagctgaaaggcaacgacgatactgcgctggaatttcgtcgtgctatctccgtgctgaaaagccttccgtttgaggtacgtagcctgaaagacacggaaggattgccctggatcagtgatgaagtcaaagggattatggaagaaatcatcgaagtcggggagtcgcgtgaagtgcaggccgtgctcaatgatgagtggtatcaaagcttccacgcatttacgcgtgtctttggagtgggggtgaagacagcagacaagtggtaccgtatgggtctgcgcaccctcgaggatgttcgttccagcaagaccctgaagttgaccccgatgcagaaagtaggtctgctgtattatgaagatcttgctcgcggcgttacgcgtgccgaagctgacgcgatttggctgctggttcaggatgcagtcgcaactttcgacccggatgcgatcgtggagattgtcggtggatttcgtcgtgggaaacctcagggtcacgacgttgatctgcttatcagttctccgggagctgagaaagagcaagaagaccaactcctgcagaaagtgatgaatctgtggaagaaacaagggttgttgctgtgtggtcgtctggaatggagtcagtgggaagatgggggttcgccttccggtaaggctgatgagggtgacgcggaggcgtcgtgctttctgatcctcaaactttatgatcatctggtgcgtaaaagtaaacgcaatatgccgactggttcgaacatgggcgagtccaaaccgtggaaagcaattaaagtagatctgctgcgttgcccctatggcagttttgcgtttgcgatgttgcagtggaccggaagccgcatgttccgtcgtgatctgcgctggtacgccctggaagagaagaacatgatgctggacaatcataatctgtatgacatgacccgcggtatcttcctccctgctaaatcggaagaggaaattttcgaacatctggggcttgaatacctggaaccgttcgaacgtaacgca

SEQ ID NO: 4254 - protein, 529 aa, synthetic construct
  REGION 1..529: note = Variant of terminal deoxynucleotidyltransferase
MHHHHHHGGSGSHGIRTIDSDFGKKQQKKGDNHDSSATYEIKFHEFVLFILEEKMGATRRTFLTDLARKKGFRVENELTDEVTHIVAENLSRSEVLAWLKEHKMEKTKQFELLDISWLIESMKVGKPVDTKGKYQLAESVEVSANPDPTEGRVNELPPTMKTVSPYACQRRTTLNNRNQRFTDSLEILRENYELKGNDDTALEFRRAISVLKSLPFEVRSLKDTEGLPWISDEVKGIMEEIIEVGESREVQAVLNDEWYQSFHAFTRVFGVGVKTADKWYRMGLRTLEDVRSSKTLKLTPMQKVGLLYYEDLARGVTRAEADAIWLLVQDAVATFDPDAIVEIVGGFRRGKPQGHDVDLLISSPGAEKEQEDQLLQKVMNLWKKQGLLLCGRLEWSQWEDGGSPSGKADEGDAEASCFLILKLYDHLVRKSKRNMPTGSNMGESKPWKAIKVDLLRCPYGSFAFAMLQWTGSRMFRRDLRWYALEEKNMMLDNHNLYDMTRGIFLPAKSEEEIFEHLGLEYLEPFERNA

SEQ ID NO: 4255 - DNA, 1587 bp, synthetic construct
  misc_feature 1..1587: note = Variant of terminal deoxynucleotidyltransferase
  source 1..1587: mol_type = other DNA
atgcaccatcatcatcatcatggcggtagcggcagccacggcattcgtaccatcgattcggacttcgggaagaaacagcagaaaaaaggcgataaccacgatagttccgccacttatgaaatcaaatttcacgagtttgtgctgttcattctcgaagaaaaaatgggtgcgacgcgtcgtacttttctgacagatttagcccgcaagaaagggttccgcgtcgagaatgaactgaccgacgaagttacccacatcgtggcagaaaatctgtcacgctctgaagtattggcttggctgaaagaacacaagatggagaagaccaagcaattcgaactgctggatattagctggcttatcgaaagcatgaaagttggtaaaccggtggacaccaaggggaaataccagttggcggaatcggttgaggtgagtgcgaacccagatccgacagaaggtcgtgtaaacgagctgcctcctactatgaaaaccgtttctccgtatgcgtgtcaacgccgcaccaccctgaacaaccgtaatcaacgttttacggactcgctggagattcttcgtgaaaattacgagctgaaaggcaacgacgatactgcgctggaatttcgtcgtgctatctccgtgctgaaaagccttccgtttgaggtacgtagcctgaaagacacggaaggattgccctggatcagtgatgaagtcaaagggattatggaagaaatcatcgaagtcggggagtcgcgtgaagtgcaggccgtgctcaatgatgagtggtatcaaagcttccacgcatttacgcgtgtctttggagtgggggtgaagacagcagacaagtggtaccgtatgggtctgcgcaccctcgaggatgttcgttccagcaagaccctgaagttgaccccgatgcagaaagtaggtctgctgtattatgaagatcttgctcgcggcgttacgcgtgccgaagctgacgcgatttggctgctggttcaggatgcagtcgcaactttcgacccggatgcgatcgtggagattgtcggtggatttcgtcgtgggaaacctcagggtcacgacgttgatctgcttatcagttctccgggagctgagaaagagcaagaagaccaactcctgcagaaagtgatgaatctgtggaagaaacaagggttgttgctgtgtggtcgtctggaatggagtcagtgggaagatgggggttcgccttccggtaaggctgatgagggtgacgcggaggcgtcgtgctttctgatcctcaaactttatgatcatctggtgcgtaaaagtaaacgcaatatgccgactggttcgaacatgggcgagtccaaaccgtggaaagcaattaaagtagatctgctgcgttgcccctatggcagttttgcgtttgcgatgttgcagtggaccggaagccgcatgttccgtcgtgatctgcgctggtacgccctggaagagaagaacatggcgctggacaatcattcgctgtatgacatgacccgcggtatcttcctccctgctaaatcggaagaggaaatcttcgaacatctggggcttgaatacctggaaccgttcgaacgtaacgca

SEQ ID NO: 4256 - protein, 529 aa, synthetic construct
  REGION 1..529: note = Variant of terminal deoxynucleotidyltransferase
MHHHHHHGGSGSHGIRTIDSDFGKKQQKKGDNHDSSATYEIKFHEFVLFILEEKMGATRRTFLTDLARKKGFRVENELTDEVTHIVAENLSRSEVLAWLKEHKMEKTKQFELLDISWLIESMKVGKPVDTKGKYQLAESVEVSANPDPTEGRVNELPPTMKTVSPYACQRRTTLNNRNQRFTDSLEILRENYELKGNDDTALEFRRAISVLKSLPFEVRSLKDTEGLPWISDEVKGIMEEIIEVGESREVQAVLNDEWYQSFHAFTRVFGVGVKTADKWYRMGLRTLEDVRSSKTLKLTPMQKVGLLYYEDLARGVTRAEADAIWLLVQDAVATFDPDAIVEIVGGFRRGKPQGHDVDLLISSPGAEKEQEDQLLQKVMNLWKKQGLLLCGRLEWSQWEDGGSPSGKADEGDAEASCFLILKLYDHLVRKSKRNMPTGSNMGESKPWKAIKVDLLRCPYGSFAFAMLQWTGSRMFRRDLRWYALEEKNMALDNHSLYDMTRGIFLPAKSEEEIFEHLGLEYLEPFERNA

SEQ ID NO: 4257 - DNA, 1587 bp, synthetic construct
  misc_feature 1..1587: note = Variant of terminal deoxynucleotidyltransferase
  source 1..1587: mol_type = other DNA
atgcaccatcatcatcatcatggcggtagcggcagccacggcattcgtaccatcgattcggacttcgggaagaaacagcagaaaaaaggcgataaccacgatagttccgccacttatgaaatcaaatttcacgagtttgtgctgttcattctcgaagaaaaaatgggtgcgacgcgtcgtacttttctgacagatttagcccgcaagaaagggttccgcgtcgagaatgaactgaccgacgaagttacccacatcgtggcagaaaatctgtcacgctctgaagtattggcttggctgaaagaacacaagatggagaagaccaagcaattcgaactgctggatattagctggcttatcgaaagcatgaaagttggtaaaccggtggacaccaaggggaaataccagttggcggaatcggttgaggtgagtgcgaacccagatccgacagaaggtcgtgtaaacgagctgcctcctactatgaaaaccgtttctccgtatgcgtgtcaacgccgcaccaccctgaacaaccgtaatcaacgttttacggactcgctggagattcttcgtgaaaattacgagctgaaaggcaacgatgatactgcgctggtgtttcgtcgtgctatctccgtgctgaaaagccttccgtttgaggtacgtagcctgaaagacacggaaggattgccctggatcagtgatgaagtcaaagggattatggaagaaatcatcgaagtcggggagtcgcgtgaagtgcaggccgtgctcaatgatgagtggtatcaaagcttccacgcatttacgcgtgtctttggagtgggggtgaagacagcagacaagtggtaccgtatgggtctgcgcaccctcgaggatgttcgttccagcaagaccctgaagttgaccccgatgcagaaagtaggtctgctgtattatgaagatcttgctcgcggcgttacgcgtgccgaagctgacgcgatttggctgctggttcaggatgcagtcgcaactttcgacccggatgcgatcgtggagattgtcggtggatttcgtcgtgggaaacctcagggtcacgacgttgatctgcttatcagttctccgggagctgagaaagagcaagaagaccaactcctgcagaaagtgatgaatctgtggaagaaacaagggttgttgctgtgtggtcgtctggaatggagtcagtgggaagatgggggttcgccttccggtaaggctgatgagggtgacgcggaggcgtcgtgctttctgatcctcaaactttatgatcatctggtgcgtaaaagtaaacgcaatatgccgactggttcgaacatgggcgagtccaaaccgtggaaagcaattaaagtagatctgctgcgttgcccctatggcagttttgcgtttgcgatgttgcagtggaccggaagccgcatgttccgtcgtgatctgcgctggtacgccctggaagagaagaacatgatgctggacaatcattcgctgtatgacatgacccgcggtatcttcctccctgctaaatcggaagaggaaattttcgaacatctggggcttgaatacctggaaccgttcgaacgtaacgca

SEQ ID NO: 4258 - protein, 529 aa, synthetic construct
  REGION 1..529: note = Variant of terminal deoxynucleotidyltransferase
MHHHHHHGGSGSHGIRTIDSDFGKKQQKKGDNHDSSATYEIKFHEFVLFILEEKMGATRRTFLTDLARKKGFRVENELTDEVTHIVAENLSRSEVLAWLKEHKMEKTKQFELLDISWLIESMKVGKPVDTKGKYQLAESVEVSANPDPTEGRVNELPPTMKTVSPYACQRRTTLNNRNQRFTDSLEILRENYELKGNDDTALVFRRAISVLKSLPFEVRSLKDTEGLPWISDEVKGIMEEIIEVGESREVQAVLNDEWYQSFHAFTRVFGVGVKTADKWYRMGLRTLEDVRSSKTLKLTPMQKVGLLYYEDLARGVTRAEADAIWLLVQDAVATFDPDAIVEIVGGFRRGKPQGHDVDLLISSPGAEKEQEDQLLQKVMNLWKKQGLLLCGRLEWSQWEDGGSPSGKADEGDAEASCFLILKLYDHLVRKSKRNMPTGSNMGESKPWKAIKVDLLRCPYGSFAFAMLQWTGSRMFRRDLRWYALEEKNMMLDNHSLYDMTRGIFLPAKSEEEIFEHLGLEYLEPFERNA

SEQ ID NO: 4259 - DNA, 1587 bp, synthetic construct
  misc_feature 1..1587: note = Variant of terminal deoxynucleotidyltransferase
  source 1..1587: mol_type = other DNA
atgcaccatcatcatcatcatggcggtagcggcagccacggcattcgtaccatcgattcggacttcgggaagaaacagcagaaaaaaggcgataaccacgatagttccgccacttatgaaatcaaatttcacgagtttgtgctgttcattctcgaagaaaaaatgggtgcgacgcgtcgtacttttctgacagatttagcccgcaagaaagggttccgcgtcgagaatgaactgaccgacgaagttacccacatcgtggcagaaaatctgtcacgctctgaagtattggcttggctgaaagaacacaagatggagaagaccaagcaattcgaactgctggatattagctggcttatcgaaagcatgaaagttggtaaaccggtggacaccaaggggaaataccagttggcggaatcggttgaggtgagtgcgaacccagatccgacagaaggtcgtgtaaacgagctgcctcctactatgaaaaccgtttctacttatgcgtgtcaacgccgcaccaccctgaacaaccgtaatcaacgttttacggactcgctggagattcttcgtgaaaattacgagctgaaaggcaacgacgatactgcgctggaatttcgtcgtgctatctccgtgctgaaaagccttccgtttgaggtacgtagcctgaaagacacggaaggattgccctggatcagtgatgaagtcaaagggattatggaagaaatcatcgaagtcggggagtcgcgtgaagtgcaggccgtgctcaatgatgagtggtatcaaagcttccacgcatttacgcgtgtctttggagtgggggtgaagacagcagacaagtggtaccgtatgggtctgcgcaccctcgaggatgttcgttccagcaagaccctgaagttgaccccgatgcagaaagtaggtctgctgtattatgaagatcttgctcgcggcgttacgcgtgccgaagctgacgcgatttggctgctggttcaggatgcagtcgcaactttcgacccggatgcgatcgtggagattgtcggtggatttcgtcgtgggaaacctcagggtcacgacgttgatctgcttatcagttctccgggagctgagaaagagcaagaagaccaactcctgcagaaagtgatgaatctgtggaagaaacaagggttgttgctgtgtggtcgtctggaatggagtcagtgggaagatgggggttcgccttccggtaaggctgatgagggtgacgcggaggcgtcgtgctttctgatcctcaaactttatgatcatctggtgcgtaaaagtaaacgcaatatgccgactggttcgaacatgggcgagtccaaaccgtggaaagcaattaaagtagatctgctgcgttgcccctatggcagttttgcgtttgcgatgttgcagtggaccggaagccgcatgttccgtcgtgatctgcgctggtacgccctggaagagaagaacatgatgctggacaatcattcgctgtatgacatgacccgcggtatcttcctccctgctaaatcggaagaggaaattttcgaacatctggggcttgaatacctggaaccgttcgaacgtaacgca

SEQ ID NO: 4260 - protein, 529 aa, synthetic construct
  REGION 1..529: note = Variant of terminal deoxynucleotidyltransferase
MHHHHHHGGSGSHGIRTIDSDFGKKQQKKGDNHDSSATYEIKFHEFVLFILEEKMGATRRTFLTDLARKKGFRVENELTDEVTHIVAENLSRSEVLAWLKEHKMEKTKQFELLDISWLIESMKVGKPVDTKGKYQLAESVEVSANPDPTEGRVNELPPTMKTVSTYACQRRTTLNNRNQRFTDSLEILRENYELKGNDDTALEFRRAISVLKSLPFEVRSLKDTEGLPWISDEVKGIMEEIIEVGESREVQAVLNDEWYQSFHAFTRVFGVGVKTADKWYRMGLRTLEDVRSSKTLKLTPMQKVGLLYYEDLARGVTRAEADAIWLLVQDAVATFDPDAIVEIVGGFRRGKPQGHDVDLLISSPGAEKEQEDQLLQKVMNLWKKQGLLLCGRLEWSQWEDGGSPSGKADEGDAEASCFLILKLYDHLVRKSKRNMPTGSNMGESKPWKAIKVDLLRCPYGSFAFAMLQWTGSRMFRRDLRWYALEEKNMMLDNHSLYDMTRGIFLPAKSEEEIFEHLGLEYLEPFERNA

SEQ ID NO: 4261 - DNA, 1587 bp, synthetic construct
  misc_feature 1..1587: note = Variant of terminal deoxynucleotidyltransferase
  source 1..1587: mol_type = other DNA
atgcaccatcatcatcatcatggcggtagcggcagccacggcattcgtaccatcgattcggacttcgggaagaaacagcagaaaaaaggcgataaccacgatagttccgccacttatgaaatcaaatttcacgagtttgtgctgttcattctcgaagaaaaaatgggtgcgacgcgtcgtacttttctgacagatttagcccgcaagaaagggttccgcgtcgagaatgaactgaccgacgaagttacccacatcgtggcagaaaatctgtcacgctctgaagtattggcttggctgaaagaacacaagatggagaagaccaagcaattcgaactgctggatattagctggcttatcgaaagcatgaaagttggtaaaccggtggacaccaaggggaaataccagttggcggaatcggttgaggtgagtgcgaacccagatccgacagaaggtcgtgtaaacgagctgcctcctactatgaaaaccgtttctccgtatgcgtgtcaacgccgcaccaccctgaacaaccgtaatcaacgttttacggactcgctggagattcttcgtgaaaattacgagctgaaaggcaacgatgttactgcgctggaatttcgtcgtgctatctccgtgctgaaaagccttccgtttgaggtacgtagcctgaaagacacggaaggattgccctggatcagtgatgaagtcaaagggattatggaagaaatcatcgaagtcggggagtcgcgtgaagtgcaggccgtgctcaatgatgagtggtatcaaagcttccacgcatttacgcgtgtctttggagtgggggtgaagacagcagacaagtggtaccgtatgggtctgcgcaccctcgaggatgttcgttccagcaagaccctgaagttgaccccgatgcagaaagtaggtctgctgtattatgaagatcttgctcgcggcgttacgcgtgccgaagctgacgcgatttggctgctggttcaggatgcagtcgcaactttcgacccggatgcgatcgtggagattgtcggtggatttcgtcgtgggaaacctcagggtcacgacgttgatctgcttatcagttctccgggagctgagaaagagcaagaagaccaactcctgcagaaagtgatgaatctgtggaagaaacaagggttgttgctgtgtggtcgtctggaatggagtcagtgggaagatgggggttcgccttccggtaaggctgatgagggtgacgcggaggcgtcgtgctttctgatcctcaaactttatgatcatctggtgcgtaaaagtaaacgcaatatgccgactggttcgaacatgggcgagtccaaaccgtggaaagcaattaaagtagatctgctgcgttgcccctatggcagttttgcgtttgcgatgttgcagtggaccggaagccgcatgttccgtcgtgatctgcgctggtacgccctggaagagaagaacatgatgctggacaatcattcgctgtatgacatgacccgcggtatcttcctccctgctaaatcggaagaggaaattttcgaacatctggggcttgaatacctggaaccgttcgaacgtaacgca

SEQ ID NO: 4262 - protein, 529 aa, synthetic construct
  REGION 1..529: note = Variant of terminal deoxynucleotidyltransferase
MHHHHHHGGSGSHGIRTIDSDFGKKQQKKGDNHDSSATYEIKFHEFVLFILEEKMGATRRTFLTDLARKKGFRVENELTDEVTHIVAENLSRSEVLAWLKEHKMEKTKQFELLDISWLIESMKVGKPVDTKGKYQLAESVEVSANPDPTEGRVNELPPTMKTVSPYACQRRTTLNNRNQRFTDSLEILRENYELKGNDVTALEFRRAISVLKSLPFEVRSLKDTEGLPWISDEVKGIMEEIIEVGESREVQAVLNDEWYQSFHAFTRVFGVGVKTADKWYRMGLRTLEDVRSSKTLKLTPMQKVGLLYYEDLARGVTRAEADAIWLLVQDAVATFDPDAIVEIVGGFRRGKPQGHDVDLLISSPGAEKEQEDQLLQKVMNLWKKQGLLLCGRLEWSQWEDGGSPSGKADEGDAEASCFLILKLYDHLVRKSKRNMPTGSNMGESKPWKAIKVDLLRCPYGSFAFAMLQWTGSRMFRRDLRWYALEEKNMMLDNHSLYDMTRGIFLPAKSEEEIFEHLGLEYLEPFERNA

SEQ ID NO: 4263 - DNA, 1587 bp, synthetic construct
  misc_feature 1..1587: note = Variant of terminal deoxynucleotidyltransferase
  source 1..1587: mol_type = other DNA
atgcaccatcatcatcatcatggcggtagcggcagccacggcattcgtaccatcgattcggacttcgggaagaaacagcagaaaaaaggcgataaccacgatagttccgccacttatgaaatcaaatttcacgagtttgtgctgttcattctcgaagaaaaaatgggtgcgacgcgtcgtacttttctgacagatttagcccgcaagaaagggttccgcgtcgagaatgaactgaccgacgaagttacccacatcgtggcagaaaatctgtcacgctctgaagtattggcttggctgaaagaacacaagatggagaagaccaagcaattcgaactgctggatattagctggcttatcgaaagcatgaaagttggtaaaccggtggacaccaaggggaaataccagttggcggaatcggttgaggtgagtgcgaacccagatccgacagaaggtcgtgtaaacgagctgcctcctactatgaaaaccgtttctccgtatgcgtgtcaacgccgcaccaccctgaacaaccgtaatcaacgttttacggactcgctggagattcttcgtgaaaattacgagctgaaaggcaacgacgatactgcgctggaatttcgtcgtgctatctccgtgctgaaaagccttccgtttgaggtacgtagcctgaaagacacggaaggattgccctggatcagtgatgaagtcaaagggattatggaagaaatcatcgaagtcggggagtcgcgtgaagtgcaggccgtgctcaatgatgagtggtatcaaagcttccacgcatttacgcgtgtctttggagtgggggtgaagacagcagacaagtggtaccgtatgggtctgcgcaccctcgaggatgttcgttccactaagaccctgaagttgaccccgatgcagaaagtaggtctgctgtattatgaagatcttgctcgcggcgttacgcgtgccgaagctgacgcgatttggctgctggttcaggatgcagtcgcaactttcgacccggatgcgatcgtggagattgtcggtggatttcgtcgtgggaaacctcagggtcacgacgttgatctgcttatcagttctccgggagctgagaaagagcaagaagaccaactcctgcagaaagtgatgaatctgtggaagaaacaagggttgttgctgtgtggtcgtctggaatggagtcagtgggaagatgggggttcgccttccggtaaggctgatgagggtgacgcggaggcgtcgtgctttctgatcctcaaactttatgatcatctggtgcgtaaaagtaaacgcaatatgccgactggttcgaacatgggcgagtccaaaccgtggaaagcaattaaagtagatctgctgcgttgcccctatggcagttttgcgtttgcgatgttgcagtggaccggaagccgcatgttccgtcgtgatctgcgctggtacgccctggaagagaagaacatgatgctggacaatcattcgctgtatgacatgacccgcggtatcttcctccctgctaaatcggaagaggaaattttcgaacatctggggcttgaatacctggaaccgttcgaacgtaacgca

SEQ ID NO: 4264 - protein, 529 aa, synthetic construct
  REGION 1..529: note = Variant of terminal deoxynucleotidyltransferase
MHHHHHHGGSGSHGIRTIDSDFGKKQQKKGDNHDSSATYEIKFHEFVLFILEEKMGATRRTFLTDLARKKGFRVENELTDEVTHIVAENLSRSEVLAWLKEHKMEKTKQFELLDISWLIESMKVGKPVDTKGKYQLAESVEVSANPDPTEGRVNELPPTMKTVSPYACQRRTTLNNRNQRFTDSLEILRENYELKGNDDTALEFRRAISVLKSLPFEVRSLKDTEGLPWISDEVKGIMEEIIEVGESREVQAVLNDEWYQSFHAFTRVFGVGVKTADKWYRMGLRTLEDVRSTKTLKLTPMQKVGLLYYEDLARGVTRAEADAIWLLVQDAVATFDPDAIVEIVGGFRRGKPQGHDVDLLISSPGAEKEQEDQLLQKVMNLWKKQGLLLCGRLEWSQWEDGGSPSGKADEGDAEASCFLILKLYDHLVRKSKRNMPTGSNMGESKPWKAIKVDLLRCPYGSFAFAMLQWTGSRMFRRDLRWYALEEKNMMLDNHSLYDMTRGIFLPAKSEEEIFEHLGLEYLEPFERNA

SEQ ID NO: 4265 - DNA, 1584 bp, synthetic construct
  misc_feature 1..1584: note = Variant of terminal deoxynucleotidyltransferase
  source 1..1584: mol_type = other DNA
atgcaccatcatcatcatggcggtagcggcagccacggcattcgtaccatcgattcggacttcgggaagaaacagcagaaaaaaggcgataaccacgatagttccgccacttatgaaatcaaatttcacgagtttgtgctgttcattctcgaagaaaaaatgggtgcgacgcgtcgtacttttctgacagatttagcccgcaagaaagggttccgcgtcgagaatgaactgaccgacgaagttacccacatcgtggcagaaaatctgtcacgctctgaagtattggcttggctgaaagaacacaagatggagaagaccaagcaattcgaactgctggatattagctggcttatcgaaagcatgaaagttggtaaaccggtggacaccaaggggaaataccagttggcggaatcggttgaggtgagtgcgaacccagatccgacagaaggtcgtgtaaacgagctgcctcctactatgaaaaccgtttctccgtatgcgtgtcaacgccgcaccaccctgaacaaccgtaatcaacgttttacggactcgctggagattcttcgtgaaaattacgagctgaaaggcaacgacgatactgcgctggaatttcgtcgtgctatctccgtgctgaaaagccttccgtttgaggtacgtagcctgaaagacacggaaggattgccctggatcagtgatgaagtcaaagggattatggaagaaatcatcgaagtcggggagtcgcgtgaagtgcaggccgtgctcaatgatgagtggtatcaaagcttccacgcatttacgcgtgtctttggagtgggggtgaagacagcagacaagtggtaccgtatgggtctgcgcaccctcgaggatgttcgttccagcaagaccctgaagttgaccccgtggcagaaagtaggtctgctgtattatgaagatcttgctcgcggcgttacgcgtgccgaagctgacgcgatttggctgctggttcaggatgcagtcgcaactttcgacccggatgcgatcgtggagattgtcggtggatttcgtcgtgggaaacctcagggtcacgacgttgatctgcttatcagttctccgggagctgaaaaagagcaagaagaccaactcctgcagaaagtgatgaatctgtggaagaaacaagggttgttgctgtgtggtcgtctggaatggagtcagtgggaatgggggggttcgccttccggtaaggctgatgagggtgacgcggaggcgtcgtgctttctgatcctcaaactttatgatcatctggtgcgtaaaagtaaacgcaatatgccgactggttcgaacatgggcgagtccaaaccgtggaaagcaattaaagtagatctgctgcgttgcccccgcggcagttttgcgtttgcgatgttgcagtggaccggaagccgcatgttccgtcgtgatctgcgctggtacgccctggaagagaagaacatgatgctggacaatcattcgctgtatgacatgactcgtggtatccaactccctgctaaatcggaagaggaaattttcgaacatctggggcttgaatacctggaaccgttcgaacgtaacgca

SEQ ID NO: 4266 - protein, 528 aa, synthetic construct
  REGION 1..528: note = Variant of terminal deoxynucleotidyltransferase
MHHHHHGGSGSHGIRTIDSDFGKKQQKKGDNHDSSATYEIKFHEFVLFILEEKMGATRRTFLTDLARKKGFRVENELTDEVTHIVAENLSRSEVLAWLKEHKMEKTKQFELLDISWLIESMKVGKPVDTKGKYQLAESVEVSANPDPTEGRVNELPPTMKTVSPYACQRRTTLNNRNQRFTDSLEILRENYELKGNDDTALEFRRAISVLKSLPFEVRSLKDTEGLPWISDEVKGIMEEIIEVGESREVQAVLNDEWYQSFHAFTRVFGVGVKTADKWYRMGLRTLEDVRSSKTLKLTPWQKVGLLYYEDLARGVTRAEADAIWLLVQDAVATFDPDAIVEIVGGFRRGKPQGHDVDLLISSPGAEKEQEDQLLQKVMNLWKKQGLLLCGRLEWSQWEWGGSPSGKADEGDAEASCFLILKLYDHLVRKSKRNMPTGSNMGESKPWKAIKVDLLRCPRGSFAFAMLQWTGSRMFRRDLRWYALEEKNMMLDNHSLYDMTRGIQLPAKSEEEIFEHLGLEYLEPFERNA

SEQ ID NO: 4267 - DNA, 1587 bp, synthetic construct
  misc_feature 1..1587: note = Variant of terminal deoxynucleotidyltransferase
  source 1..1587: mol_type = other DNA
atgcaccatcatcatcatcatggcggtagcggcagccacggcattcgtaccatcgattcggacttcgggaagaaacagcagaaaaaaggcgataaccacgatagttccgccacttatgaaatcaaatttcacgagtttgtgctgttcattctcgaagaaaaaatgggtgcgacgcgtcgtacttttctgacagatttagcccgcaagaaagggttccgcgtcgagaatgaactgaccgacgaagttacccacatcgtggcagaaaatctgtcacgctctgaagtattggcttggctgaaagaacacaagatggagaagaccaagcaattcgaactgctggatattagctggcttatcgaaagcatgaaagttggtaaaccggtggacaccaaggggaaataccagttggcggaatcggttgaggtgagtgcgaacccagatccgacagaaggtcgtgtaaacgagctgcctcctactatgaaaaccgtttctccgtatgcgtgtcaacgccgcaccaccctgaacaaccgtaatcaacgttttacggactcgctggagattcttcgtgaaaattacgagctgaaaggcaacgacgatactgcgctggaatttcgtcgtgctatctccgtgctgaaaagccttccgtttgaggtacgtagcctgaaagacacggaaggattgccctggatcagtgatgaagtcaaagggattatggaagaaatcatcgaagtcggggagtcgcgtgaagtgcaggccgtgctcaatgatgagtggtatcaaagcttccacgcatttacgcgtgtctttggagtgggggtgaagacagcagacaagtggtaccgtatgggtctgcgcaccctcgaggatgttcgttccagcaagaccctgaagttgaccccgtggcagaaagtaggtctgctgtattatgaagatcttgctcgcggcgttacgcgtgccgaagctgacgcgatttggctgctggttcaggatgcagtcgcaactttcgacccggatgcgatcgtggagattgtcggtggatttcgtcgtgggaaacctcagggtcacgacgttgatctgcttatcagttctccgggagctgagaaagagcaagaagaccaactcctgcagaaagtgatgaatctgtggaagaaacaagggttgttgctgtgtggtcgtctggaatggagtcagtgggaagatgggggctcgccttccggtaaggctgatgagggtgacgcggaggcgtcgtgctttctgatcctcaaactttatgatcatctggtgcgtaaaagtaaacgcaatatgccgactggttcgaacatgggcgagtccaaaccgtggaaagcaattaaagtagatctgctgcgttgcccctatggcagttttgcgtttgcgatgttgcagtggaccggaagccgcatgttccgtcgtgatctgcgccgctacgccctggaagagaagaacatgatgctggacaatcattcgctgtatgacatgacccgcggtatcttcctccctgctaaatcggaagaggagattttcgaacatctggggcttgaatacctggaaccgttcgaacgtaacgca

SEQ ID NO: 4268 - protein, 529 aa, synthetic construct
  REGION 1..529: note = Variant of terminal deoxynucleotidyltransferase
MHHHHHHGGSGSHGIRTIDSDFGKKQQKKGDNHDSSATYEIKFHEFVLFILEEKMGATRRTFLTDLARKKGFRVENELTDEVTHIVAENLSRSEVLAWLKEHKMEKTKQFELLDISWLIESMKVGKPVDTKGKYQLAESVEVSANPDPTEGRVNELPPTMKTVSPYACQRRTTLNNRNQRFTDSLEILRENYELKGNDDTALEFRRAISVLKSLPFEVRSLKDTEGLPWISDEVKGIMEEIIEVGESREVQAVLNDEWYQSFHAFTRVFGVGVKTADKWYRMGLRTLEDVRSSKTLKLTPWQKVGLLYYEDLARGVTRAEADAIWLLVQDAVATFDPDAIVEIVGGFRRGKPQGHDVDLLISSPGAEKEQEDQLLQKVMNLWKKQGLLLCGRLEWSQWEDGGSPSGKADEGDAEASCFLILKLYDHLVRKSKRNMPTGSNMGESKPWKAIKVDLLRCPYGSFAFAMLQWTGSRMFRRDLRRYALEEKNMMLDNHSLYDMTRGIFLPAKSEEEIFEHLGLEYLEPFERNA

SEQ ID NO: 4269 - DNA, 1587 bp, synthetic construct
  misc_feature 1..1587: note = Variant of terminal deoxynucleotidyltransferase
  source 1..1587: mol_type = other DNA
atgcaccatcatcatcatcatggcggtagcggcagccacggcattcgtaccatcgattcggacttcgggaagaaacagcagaaaaaaggcgataaccacgatagttccgccacttatgaaatcaaatttcacgagtttgtgctgttcattctcgaagaaaaaatgggtgcgacgcgtcgtacttttctgacagatttagcccgcaagaaagggttccgcgtcgagaatgaactgaccgacgaagttacccacatcgtggcagaaaatctgtcacgctctgaagtattggcttggctgaaagaacacaagatggagaagaccaagcaattcgaactgctggatattagctggcttatcgaaagcatgaaagttggtaaaccggtggacaccaaggggaaataccagttggcggaatcggttgaggtgagtgcgaacccagatccgacagaaggtcgtgtaaacgagctgcctcctactatgaaaaccgtttctccgtatgcgtgtcaacgccgcaccaccctgaacaaccgtaatcaacgttttacggactcgctggagattcttcgtgaaaattacgagctgaaaggcaacgacgatactgcgctggaatttcgtcgtgctatctccgtgctgaaaagccttccgtttgaggtacgtagcctgaaagacacggaaggattgccctggatcagtgatgaagtcaaagggattatggaagaaatcatcgaagtcggggagtcgcgtgaagtgcaggccgtgctcaatgatgagtggtatcaaagcttccacgcatttacgcgtgtctttggagtgggggtgaagacagcagacaagtggtaccgtatgggtctgcgcaccctcgaggatgttcgttccagcaagaccctgaagttgaccccgtggcagaaagtaggtctgctgtattatgaagatcttgctcgcggcgttacgcgtgccgaagctgacgcgatttggctgctggttcaggatgcagtcgcaactttcgacccggatgcgatcgtggagattgtcggtggatttcgtcgtgggaaacctcagggtcacgacgttgatctgcttatcagttctccgggagctgagaaagagcaagaagaccaactcctgcagaaagtgatgaatctgtggaagaaacaagggttgttgctgtgtggtcgtctggaatggagtcagtgggaatgggggggttcgccttccggtaaggctgatgagggtgacgcggaggcgtcgtgctttctgatcctcaaactttatgatcatctggtgcgtaaaagtaaacgcaatatgccgactggttcgaacatgggcgagtccaaaccgtggaaagcaattaaagtagatctgctgcgttgccccgtcggcagttttgcgtttgcgatgttgcagtggaccggaagccgcatgttccgtcgtgatctgcgctggtacgccctggaagagaagaacatgatgctggacaatcattcgctgtatgaccgtagtcgtggtatccaactccctgctaaatcggaagaggaaattttcgaacatctggggcttgaatacctggaaccgttcgaacgtaacgca

SEQ ID NO: 4270 - protein, 529 aa, synthetic construct
  REGION 1..529: note = Variant of terminal deoxynucleotidyltransferase
MHHHHHHGGSGSHGIRTIDSDFGKKQQKKGDNHDSSATYEIKFHEFVLFILEEKMGATRRTFLTDLARKKGFRVENELTDEVTHIVAENLSRSEVLAWLKEHKMEKTKQFELLDISWLIESMKVGKPVDTKGKYQLAESVEVSANPDPTEGRVNELPPTMKTVSPYACQRRTTLNNRNQRFTDSLEILRENYELKGNDDTALEFRRAISVLKSLPFEVRSLKDTEGLPWISDEVKGIMEEIIEVGESREVQAVLNDEWYQSFHAFTRVFGVGVKTADKWYRMGLRTLEDVRSSKTLKLTPWQKVGLLYYEDLARGVTRAEADAIWLLVQDAVATFDPDAIVEIVGGFRRGKPQGHDVDLLISSPGAEKEQEDQLLQKVMNLWKKQGLLLCGRLEWSQWEWGGSPSGKADEGDAEASCFLILKLYDHLVRKSKRNMPTGSNMGESKPWKAIKVDLLRCPVGSFAFAMLQWTGSRMFRRDLRWYALEEKNMMLDNHSLYDRSRGIQLPAKSEEEIFEHLGLEYLEPFERNA

SEQ ID NO: 4271 - DNA, 1587 bp, synthetic construct
  misc_feature 1..1587: note = Variant of terminal deoxynucleotidyltransferase
  source 1..1587: mol_type = other DNA
atgcaccatcatcatcatcatggcggtagcggcagccacggcattcgtaccatcgattcggacttcgggaagaaacagcagaaaaaaggcgataaccacgatagttccgccacttatgaaatcaaatttcacgagtttgtgctgttcattctcgaagaaaaaatgggtgcgacgcgtcgtacttttctgacagatttagcccgcaagaaagggttccgcgtcgagaatgaactgaccgacgaagttacccacatcgtggcagaaaatctgtcacgctctgaagtattggcttggctgaaagaacacaagatggagaagaccaagcaattcgaactgctggatattagctggcttatcgaaagcatgaaagttggtaaaccggtggacaccaaggggaaataccagttggcggaatcggttgaggtgagtgcgaacccagatccgacagaaggtcgtgtaaacgagctgcctcctactatgaaaaccgtttctccgtatgcgtgtcaacgccgcaccaccctgaacaaccgtaatcaacgttttacggactcgctggagattcttcgtgaaaattacgagctgaaaggcaacgacgatactgcgctggaatttcgtcgtgctatctccgtgctgaaaagccttccgtttgaggtacgtagcctgaaagacacggaaggattgccctggatcagtgatgaagtcaaagggattatggaagaaatcatcgaagtcggggagtcgcgtgaagtgcaggccgtgctcaatgatgagtggtatcaaagcttccacgcatttacgcgtgtctttggagtgggggtgaagacagcagacaagtggtaccgtatgggtctgcgcaccctcgaggatgttcgttccagcaagaccctgaagttgaccccgtggcagaaagtaggtctgctgtattatgaagatcttgctcgcggcgttacgcgtgccgaagctgacgcgatttggctgctggttcaggatgcagtcgcaactgtcgacccggatgcgatcgtggagattgtcggtggatttcgtcgtgggaaacctcagggtcacgacgttgatctgcttatcagttctccgggagctgagaaagagcaagaagaccaactcctgcagaaagtgatgaatctgtggaagaaacaagggttgttgctgtgtggtcgtctggaatggagtcagtgggaagatgggggttcgccttccggtaaggctgatgagggtgacgcggaggcgtcgtgctttctgatcctcaaactttatgatcatctggtgcgtaaaagtaaacgcaatatgccgactggttcgaacatgggcgagtccaaaccgtggaaagcaattaaagtagatctgctgcgttgcccctatggcagttttgcgtttgcgatgttgcagtggaccggaagccgcatgttccgtcgtgatctgcgccgctacgcccgtgaagagaagaacatgatgctggacaatcattcgctgtatgacatgacccgcggtatcttcctccctgctaaatcggaagaggagattttcgaacatctggggcttgaatacctggaaccgttcgaacgtaacgca

SEQ ID NO: 4272 - protein, 529 aa, synthetic construct
  REGION 1..529: note = Variant of terminal deoxynucleotidyltransferase
MHHHHHHGGSGSHGIRTIDSDFGKKQQKKGDNHDSSATYEIKFHEFVLFILEEKMGATRRTFLTDLARKKGFRVENELTDEVTHIVAENLSRSEVLAWLKEHKMEKTKQFELLDISWLIESMKVGKPVDTKGKYQLAESVEVSANPDPTEGRVNELPPTMKTVSPYACQRRTTLNNRNQRFTDSLEILRENYELKGNDDTALEFRRAISVLKSLPFEVRSLKDTEGLPWISDEVKGIMEEIIEVGESREVQAVLNDEWYQSFHAFTRVFGVGVKTADKWYRMGLRTLEDVRSSKTLKLTPWQKVGLLYYEDLARGVTRAEADAIWLLVQDAVATVDPDAIVEIVGGFRRGKPQGHDVDLLISSPGAEKEQEDQLLQKVMNLWKKQGLLLCGRLEWSQWEDGGSPSGKADEGDAEASCFLILKLYDHLVRKSKRNMPTGSNMGESKPWKAIKVDLLRCPYGSFAFAMLQWTGSRMFRRDLRRYAREEKNMMLDNHSLYDMTRGIFLPAKSEEEIFEHLGLEYLEPFERNA

SEQ ID NO: 4273 - DNA, 1587 bp, synthetic construct
  misc_feature 1..1587: note = Variant of terminal deoxynucleotidyltransferase
  source 1..1587: mol_type = other DNA
atgcaccatcatcatcatcatggcggtagcggcagccacggcattcgtaccatcgattcggacttcgggaagaaacagcagaaaaaaggcgataaccacgatagttccgccacttatgaaatcaaatttcacgagtttgtgctgttcattctcgaagaaaaaatgggtgcgacgcgtcgtacttttctgacagatttagcccgcaagaaagggttccgcgtcgagaatgaactgaccgacgaagttacccacatcgtggcagaaaatctgtcacgctctgaagtattggcttggctgaaagaacacaagatggagaagaccaagcaattcgaactgctggatattagctggcttatcgaaagcatgaaagttggtaaaccggtggacaccaaggggaaataccagttggcggaatcggttgaggtgagtgcgaacccagatccgacagaaggtcgtgtaaacgagctgcctcctactatgaaaaccgtttctccgtatgcgtgtcaacgccgcaccaccctgaacaaccgtaatcaacgttttacggactcgctggagattcttcgtgaaaattacgagctgaaaggcaacgacgatactgcgctggaatttcgtcgtgctatctccgtgctgaaaagccttccgtttgaggtacgtagcctgaaagacacggaaggattgccctggatcagtgatgaagtcaaagggattatggaagaaatcatcgaagtcggggagtcgcgtgaagtgcaggccgtgctcaatgatgagtggtatcaaagcttccacgcatttacgcgtgtctttggagtgggggtgaagacagcagacaagtggtaccgtatgggtctgcgcaccctcgaggatgttcgttccagcaagaccctgaagttgaccccgtggcagaaagtaggtctgctgtattatgaagatcttgctcgcggcgttacgcgtgccgaagctgacgcgatttggctgctggttcaggatgcagtcgcaactttcgacccggatgcgatcgtggagattgtcggtggatttcgtcgtgggaaacctcagggtcacgacgttgatctgcttatcagttctccgggagctgagaaagagcaagaagaccaactcctgcagaaagtgatgaatctgtggaagaaacaagggttgttgctgtgtggtcgtctggaatggagtcagtgggaagatgggggctcgccttccggtaaggctgatgagggtgacgcggaggcgtcgtgctttctgatcctcaaactttatgatcatctggtgcgtaaaagtaaacgcaatatgccgactggttcgaacatgggcgagtccaaaccgtggaaagcaattaaagtagatctgctgcgttgcccctatggcagttttgcgtttgcgatgttgcagtggaccggaagccgcatgttccgtcgtgatctgcgccgctacgccctggaagagaagaacatgatgctggacaaccattcgctgtatgacatgacccgcggtatcttcctccctgctaaatcggaagagcgcattttcgaacatctggggcttgaatacctggaaccgttcgaacgtaacgca

SEQ ID NO: 4274 - protein, 529 aa, synthetic construct
  REGION 1..529: note = Variant of terminal deoxynucleotidyltransferase
MHHHHHHGGSGSHGIRTIDSDFGKKQQKKGDNHDSSATYEIKFHEFVLFILEEKMGATRRTFLTDLARKKGFRVENELTDEVTHIVAENLSRSEVLAWLKEHKMEKTKQFELLDISWLIESMKVGKPVDTKGKYQLAESVEVSANPDPTEGRVNELPPTMKTVSPYACQRRTTLNNRNQRFTDSLEILRENYELKGNDDTALEFRRAISVLKSLPFEVRSLKDTEGLPWISDEVKGIMEEIIEVGESREVQAVLNDEWYQSFHAFTRVFGVGVKTADKWYRMGLRTLEDVRSSKTLKLTPWQKVGLLYYEDLARGVTRAEADAIWLLVQDAVATFDPDAIVEIVGGFRRGKPQGHDVDLLISSPGAEKEQEDQLLQKVMNLWKKQGLLLCGRLEWSQWEDGGSPSGKADEGDAEASCFLILKLYDHLVRKSKRNMPTGSNMGESKPWKAIKVDLLRCPYGSFAFAMLQWTGSRMFRRDLRRYALEEKNMMLDNHSLYDMTRGIFLPAKSEERIFEHLGLEYLEPFERNA

SEQ ID NO: 4275 - DNA, 1587 bp, synthetic construct
  misc_feature 1..1587: note = Variant of terminal deoxynucleotidyltransferase
  source 1..1587: mol_type = other DNA
atgcaccatcatcatcatcatggcggtagcggcagccacggcattcgtaccatcgattcggacttcgggaagaaacagcagaaaaaaggcgataaccacgatagttccgccacttatgaaatcaaatttcacgagtttgtgctgttcattctcgaagaaaaaatgggtgcgacgcgtcgtacttttctgacagatttagcccgcaagaaagggttccgcgtcgagaatgaactgaccgacgaagttacccacatcgtggcagaaaatctgtcacgctctgaagtattggcttggctgaaagaacacaagatggagaagaccaagcaattcgaactgctggatattagctggcttatcgaaagcatgaaagttggtaaaccggtggacaccaaggggaaataccagttggcggaatcggttgaggtgagtgcgaacccagatccgacagaaggtcgtgtaaacgagctgcctcctactatgaaaaccgtttctccgtatgcgtgtcaacgccgcaccaccctgaacaaccgtaatcaacgttttacggactcgctggagattcttcgtgaaaattacgagctgaaaggcaacgacgatactgcgctggaatttcgtcgtgctatctccgtgctgaaaagccttccgtttgaggtacgtagcctgaaagacacggaaggattgccctggatcagtgatgaagtcaaagggattatggaagaaatcatcgaagtcggggagtcgcgtgaagtgcaggccgtgctcaatgatgagtggtatcaaagcttccacgcatttacgcgtgtctttggagtgggggtgaagacagcagacaagtggtaccgtatgggtctgcgcaccctcgaggatgttcgttccagcaagaccctgaagttgaccccgtggcagaaagtaggtctgctgtattatgaagatcttgctcgcggcgttacgcgtgccgaagctgacgcgatttggctgctggttcaggatgcagtcgcaactttcgacccggatgcgatcgtggagattgtcggtggatttcgtcgtgggaaacctcagggtcacgacgttgatctgcttatcagttctccgggagctgagaaagagcaagaagaccaactcctgcagaaagtgatgaatctgtggaagaaacaagggttgttgctgtgtggtcgtctggaaaatagtcagtgggaagatgggggttcgccttccggtaaggctgatgagggtgacgcggaggcgtcgtgctttctgatcctcaaactttatgatcatctggtgcgtaaaagtaaacgcaatatgccgactggttcgaacatgggcgagtccaaaccgtggaaagcaattaaagtagatctgctgcgttgcccctatggcagttttgcgtttgcgatgttgcagtggaccggaagccgcatgttccgtcgtgatctgcgctggtacgcccgtgaagagaagaacatgatgctggacaatcattcgctgtatgacatgacccgcggtatcttcctccctgctaaatcggaagaggaaattttcgaacatctggggcttgaatacctggaaccgttcgaacgtaacgca

SEQ ID NO: 4276 - protein, 529 aa, synthetic construct
  REGION 1..529: note = Variant of terminal deoxynucleotidyltransferase
MHHHHHHGGSGSHGIRTIDSDFGKKQQKKGDNHDSSATYEIKFHEFVLFILEEKMGATRRTFLTDLARKKGFRVENELTDEVTHIVAENLSRSEVLAWLKEHKMEKTKQFELLDISWLIESMKVGKPVDTKGKYQLAESVEVSANPDPTEGRVNELPPTMKTVSPYACQRRTTLNNRNQRFTDSLEILRENYELKGNDDTALEFRRAISVLKSLPFEVRSLKDTEGLPWISDEVKGIMEEIIEVGESREVQAVLNDEWYQSFHAFTRVFGVGVKTADKWYRMGLRTLEDVRSSKTLKLTPWQKVGLLYYEDLARGVTRAEADAIWLLVQDAVATFDPDAIVEIVGGFRRGKPQGHDVDLLISSPGAEKEQEDQLLQKVMNLWKKQGLLLCGRLENSQWEDGGSPSGKADEGDAEASCFLILKLYDHLVRKSKRNMPTGSNMGESKPWKAIKVDLLRCPYGSFAFAMLQWTGSRMFRRDLRWYAREEKNMMLDNHSLYDMTRGIFLPAKSEEEIFEHLGLEYLEPFERNA

SEQ ID NO: 4277 - DNA, 1587 bp, synthetic construct
  misc_feature 1..1587: note = Variant of terminal deoxynucleotidyltransferase
  source 1..1587: mol_type = other DNA
atgcaccatcatcatcatcatggcggtagcggcagccacggcattcgtaccatcgattcggacttcgggaagaaacagcagaaaaaaggcgataaccacgatagttccgccacttatgaaatcaaatttcacgagtttgtgctgttcattctcgaagaaaaaatgggtgcgacgcgtcgtacttttctgacagatttagcccgcaagaaagggttccgcgtcgagaatgaactgaccgacgaagttacccacatcgtggcagaaaatctgtcacgctctgaagtattggcttggctgaaagaacacaagatggagaagaccaagcaattcgaactgctggatattagctggcttatcgaaagcatgaaagttggtaaaccggtggacaccaaggggaaataccagttggcggaatcggttgaggtgagtgcgaacccagatccgacagaaggtcgtgtaaacgagctgcctcctactatgaaaaccgtttctccgtatgcgtgtcaacgccgcaccaccctgaacaaccgtaatcaacgttttacggactcgctggagattcttcgtgaaaattacgagctgaaaggcaacgacgatactgcgctggaatttcgtcgtgctatctccgtgctgaaaagccttccgtttgaggtacgtagcctgaaagacacggaaggattgccctggatcagtgatgaagtcaaagggattatggaagaaatcatcgaagtcggggagtcgcgtgaagtgcaggccgtgctcaatgatgagtggtatcaaagcttccacgcatttacgcgtgtctttggagtgggggtgaagacagcagacaagtggtaccgtatgggtctgcgcaccctcgaggatgttcgttccagcaagaccctgaagttgaccccgtggcagaaagtaggtctgctgtattatgaagatcttgctcgcggcgttacgcgtgccgaagctgacgcgatttggctgctggttcaggatgcagtcgcaactttcgacccggatgcgatcgtggagattgtcggtggatttcgtcgtgggaaacctcagggtcacgacgttgatctgcttatcagttctccgggagctgaaaaagagcaagaagaccaactcctgcagaaagtgatgaatctgtggaagaaacaagggttgttgctgtgtggtcgtctggaatggagtcagtgggaatgggggggttcgccttccggtaaggctgatgagggtgacgcggaggcgtcgtgctttctgatcctcaaactttatgatcatctggtgcgtaaaagtaaacgcaatatgccgactggttcgaacatgggcgagtccaaaccgtggaaagcaattaaagtagatctgctgcgttgccccgtcggcagttttgcgtttgcgatgttgcagtggaccggaagccgcatgttccgtcgtgatctgcgctggtacgccctggaagagaagaacatgatgctggacaatcattcgctgtatgacatgacccgcggtatcttcctccctgctaaatcggaagaggaaattttcgaacatctggggcttgaatacctggaaccgttcgaacgtaacgca

SEQ ID NO: 4278 - protein, 529 aa, synthetic construct
  REGION 1..529: note = Variant of terminal deoxynucleotidyltransferase
MHHHHHHGGSGSHGIRTIDSDFGKKQQKKGDNHDSSATYEIKFHEFVLFILEEKMGATRRTFLTDLARKKGFRVENELTDEVTHIVAENLSRSEVLAWLKEHKMEKTKQFELLDISWLIESMKVGKPVDTKGKYQLAESVEVSANPDPTEGRVNELPPTMKTVSPYACQRRTTLNNRNQRFTDSLEILRENYELKGNDDTALEFRRAISVLKSLPFEVRSLKDTEGLPWISDEVKGIMEEIIEVGESREVQAVLNDEWYQSFHAFTRVFGVGVKTADKWYRMGLRTLEDVRSSKTLKLTPWQKVGLLYYEDLARGVTRAEADAIWLLVQDAVATFDPDAIVEIVGGFRRGKPQGHDVDLLISSPGAEKEQEDQLLQKVMNLWKKQGLLLCGRLEWSQWEWGGSPSGKADEGDAEASCFLILKLYDHLVRKSKRNMPTGSNMGESKPWKAIKVDLLRCPVGSFAFAMLQWTGSRMFRRDLRWYALEEKNMMLDNHSLYDMTRGIFLPAKSEEEIFEHLGLEYLEPFERNA

SEQ ID NO: 4279 - DNA, 1587 bp, synthetic construct
  misc_feature 1..1587: note = Variant of terminal deoxynucleotidyltransferase
  source 1..1587: mol_type = other DNA
atgcaccatcatcatcatcatggcggtagcggcagccacggcattcgtaccatcgattcggacttcgggaagaaacagcagaaaaaaggcgataaccacgatagttccgccacttatgaaatcaaatttcacgagtttgtgctgttcattctcgaagaaaaaatgggtgcgacgcgtcgtacttttctgacagatttagcccgcaagaaagggttccgcgtcgagaatgaactgaccgacgaagttacccacatcgtggcagaaaatctgtcacgctctgaagtattggcttggctgaaagaacacaagatggagaagaccaagcaattcgaactgctggatattagctggcttatcgaaagcatgaaagttggtaaaccggtggacaccaaggggaaataccagttggcggaatcggttgaggtgagtgcgaacccagatccgacagaaggtcgtgtaaacgagctgcctcctactatgaaaaccgtttctccgtatgcgtgtcaacgccgcaccaccctgaacaaccgtaatcaacgttttacggactcgctggagattcttcgtgaaaattacgagctgaaaggcaacgacgatactgcgctgcgttttcgtcgtgctatctccgtgctgaaaagccttccgtttgaggtacgtagcctgaaagacacggaaggattgccctggatcagtgatgaagtcaaagggattatggaagaaatcatcgaagtcggggagtcgcgtgaagtgcaggccgtgctcaatgatgagtggtatcaaagcttccacgcatttacgcgtgtctttggagtgggggtgaagacagcagacaagtggtaccgtatgggtctgcgcaccctcgaggatgttcgttccagcaagaccctgaagttgaccccgtggcagaaagtaggtctgctgtattatgaagatcttgctcgcggcgttacgcgtgccgaagctgacgcgatttggctgctggttcaggatgcagtcgcaactttcgacccggatgcgatcgtggagattgtcggtggatttcgtcgtgggaaacctcagggtcacgacgttgatctgcttatcagttctccgggagctgaaaaagagcaagaagaccaactcctgcagaaagtgatgaatctgtggaagaaacaagggttgttgctgtgtggtcgtctggaatggagtcagtgggaagacgggggttcgccttccggtaaggctgatgagggtgacgcggaggcgtcgtgctttctgatcctcaaactttatgatcatctggtgcgtaaaagtaaacgcaatatgccgactggttcgaacatgggcgagtccaaaccgtggaaagcaattaaagtagatctgctgcgttgccccgtcggcagttttgcgtttgcgatgttgcagtggaccggaagccgcatgttccgtcgtgatctgcgctggtacgccctggaagagaagaacatgatgctggacaatcattcgctgtatgacatgacccgcggtatcttcctccctgctaaatcggaagaggaaattttcgaacatctggggcttgaatacctggaaccgttcgaacgtaacgca

SEQ ID NO: 4280 - protein, 529 aa, synthetic construct
  REGION 1..529: note = Variant of terminal deoxynucleotidyltransferase
MHHHHHHGGSGSHGIRTIDSDFGKKQQKKGDNHDSSATYEIKFHEFVLFILEEKMGATRRTFLTDLARKKGFRVENELTDEVTHIVAENLSRSEVLAWLKEHKMEKTKQFELLDISWLIESMKVGKPVDTKGKYQLAESVEVSANPDPTEGRVNELPPTMKTVSPYACQRRTTLNNRNQRFTDSLEILRENYELKGNDDTALRFRRAISVLKSLPFEVRSLKDTEGLPWISDEVKGIMEEIIEVGESREVQAVLNDEWYQSFHAFTRVFGVGVKTADKWYRMGLRTLEDVRSSKTLKLTPWQKVGLLYYEDLARGVTRAEADAIWLLVQDAVATFDPDAIVEIVGGFRRGKPQGHDVDLLISSPGAEKEQEDQLLQKVMNLWKKQGLLLCGRLEWSQWEDGGSPSGKADEGDAEASCFLILKLYDHLVRKSKRNMPTGSNMGESKPWKAIKVDLLRCPVGSFAFAMLQWTGSRMFRRDLRWYALEEKNMMLDNHSLYDMTRGIFLPAKSEEEIFEHLGLEYLEPFERNA

SEQ ID NO: 4281 - DNA, 1587 bp, synthetic construct
  misc_feature 1..1587: note = Variant of terminal deoxynucleotidyltransferase
  source 1..1587: mol_type = other DNA
atgcaccatcatcatcatcatggcggtagcggcagccacggcattcgtaccatcgattcggacttcgggaagaaacagcagaaaaaaggcgataaccacgatagttccgccacttatgaaatcaaatttcacgagtttgtgctgttcattctcgaagaaaaaatgggtgcgacgcgtcgtacttttctgacagatttagcccgcaagaaagggttccgcgtcgagaatgaactgaccgacgaagttacccacatcgtggcagaaaatctgtcacgctctgaagtattggcttggctgaaagaacacaagatggagaagaccaagcaattcgaactgctggatattagctggcttatcgaaagcatgaaagttggtaaaccggtggacaccaaggggaaataccagttggcggaatcggttgaggtgagtgcgaacccagatccgacagaaggtcgtgtaaacgagctgcctcctactatgaaaaccgtttctccgtatgcgtgtcaacgccgcaccaccctgaacaaccgtaatcaacgttttacggactcgctggagattcttcgtgaaaattacgagctgaaaggcaacgacgatactgcgctggaatttcgtcgtgctatctccgtgctgaaaagccttccgtttgaggtacgtagcctgaaagacacggaaggattgccctggatcagtgatgaagtcaaagggattatggaagaaatcatcgaagtcggggagtcgcgtgaagtgcaggccgtgctcaatgatgagtggtatcaaagcttccacgcatttacgcgtgtctttggagtgggggtgaagacagcagacaagtggtaccgtatgggtctgcgcaccctcgaggatgttcgttccagcaagaccctgaagttgaccccgtggcagaaagtaggtctgctgtattatgaagatcttgctcgcggcgttacgcgtgccgaagctgacgcgatttggctgctggttcaggatgcagtcgcaactgtcgacccggatgcgatcgtggagattgtcggtggatttcgtcgtgggaaacctcagggtcacgacgttgatctgcttatcagttctccgggagctgagaaagagcaagaagaccaactcctgcagaaagtgatgaatctgtggaagaaacaagggttgttgctgtgtggtcgtctggaatggagtcagtgggaagatgggcgctcgccttccggtaaggctgatgagggtgacgcggaggcgtcgtgctttctgatcctcaaactttatgatcatctggtgcgtaaaagtaaacgcaatatgccgactggttcgaacatgggcgagtccaaaccgtggaaagcaattaaagtagatctgctgcgttgcccctatggcagttttgcgtttgcgatgttgcagtggaccggaagccgcatgttccgtcgtgatctgcgccgctacgcccgtgaagagaagaacatgatgctggacaatcattcgctgtatgacatgacccgcggtatcttcctccctgctaaatcggaagaggaaattttcgaacatctggggcttgaatacctggaaccgttcgaacgtaacgca

SEQ ID NO: 4282 - protein, 529 aa, synthetic construct
  REGION 1..529: note = Variant of terminal deoxynucleotidyltransferase
MHHHHHHGGSGSHGIRTIDSDFGKKQQKKGDNHDSSATYEIKFHEFVLFILEEKMGATRRTFLTDLARKKGFRVENELTDEVTHIVAENLSRSEVLAWLKEHKMEKTKQFELLDISWLIESMKVGKPVDTKGKYQLAESVEVSANPDPTEGRVNELPPTMKTVSPYACQRRTTLNNRNQRFTDSLEILRENYELKGNDDTALEFRRAISVLKSLPFEVRSLKDTEGLPWISDEVKGIMEEIIEVGESREVQAVLNDEWYQSFHAFTRVFGVGVKTADKWYRMGLRTLEDVRSSKTLKLTPWQKVGLLYYEDLARGVTRAEADAIWLLVQDAVATVDPDAIVEIVGGFRRGKPQGHDVDLLISSPGAEKEQEDQLLQKVMNLWKKQGLLLCGRLEWSQWEDGRSPSGKADEGDAEASCFLILKLYDHLVRKSKRNMPTGSNMGESKPWKAIKVDLLRCPYGSFAFAMLQWTGSRMFRRDLRRYAREEKNMMLDNHSLYDMTRGIFLPAKSEEEIFEHLGLEYLEPFERNA

SEQ ID NO: 4283 - DNA, 1587 bp, synthetic construct
  misc_feature 1..1587: note = Variant of terminal deoxynucleotidyltransferase
  source 1..1587: mol_type = other DNA
atgcaccatcatcatcatcatggcggtagcggcagccacggcattcgtaccatcgattcggacttcgggaagaaacagcagaaaaaaggcgataaccacgatagttccgccacttatgaaatcaaatttcacgagtttgtgctgttcattctcgaagaaaaaatgggtgcgacgcgtcgtacttttctgacagatttagcccgcaagaaagggttccgcgtcgagaatgaactgaccgacgaagttacccacatcgtggcagaaaatctgtcacgctctgaagtattggcttggctgaaagaacacaagatggagaagaccaagcaattcgaactgctggatattagctggcttatcgaaagcatgaaagttggtaaaccggtggacaccaaggggaaataccagttggcggaatcggttgaggtgagtgcgaacccagatccgacagaaggtcgtgtaaacgagctgcctcctactatgaaaaccgtttctccgtatgcgtgtcaacgccgcaccaccctgaacaaccgtaatcaacgttttacggactcgctggagattcttcgtgaaaattacgagctgaaaggcaacgacgatactgcgctggaatttcgtcgtgctatctccgtgctgaaaagccttccgtttgaggtacgtagcctgaaagacacggaaggattgccctggatcagtgatgaagtcaaagggattatggaagaaatcatcgaagtcggggagtcgcgtgaagtgcaggccgtgctcaatgatgagtggtatcaaagcttccacgcatttacgcgtgtctttggagtgggggtgaagacagcagacaagtggtaccgtatgggtctgcgcaccctcgaggatgttcgttccagcaagaccctgaagttgaccccgtggcagaaagtaggtctgctgtattatgaagatcttgctcgcggcgttacgcgtgccgaagctgacgcgatttggctgctggttcaggatgcagtcgcaactttcgacccggatgcgatcgtggagattgtcggtggatttcgtcgtgggaaacctcagggtcacgacgttgatctgcttatcagttctccgggagctgagaaagagcaagaagaccaactcctgcagaaagtgatgaatctgtggaagaaacaagggttgttgctgtgtggtcgtctggaatggagtcagtgggaagatgggggttcgccttccggtaaggctgatgagggtgacgcggaggcgtcgtgctttctgatcctcaaactttatgatcatctggtgcgtaaaagtaaacgcaatatgccgactggttcgaacatgggcgagtccaaaccgtggaaagcaattaaagtagatctgctgcgttgcccctatggcagttttgcgtttgcgatgttgcagtggaccggaagccgcatgttccgtcgtgatctgcgctggtacgcccgtgaagagaagaacatgatgctggacaatcattcgctgtatgacatgacccgcggtatcttcctccctgctaaatcggaagaggaaattttcgaacatctggggcttgaatacctggaaccgttcgaacgtaacgca

SEQ ID NO: 4284 - protein, 529 aa, synthetic construct
  REGION 1..529: note = Variant of terminal deoxynucleotidyltransferase
MHHHHHHGGSGSHGIRTIDSDFGKKQQKKGDNHDSSATYEIKFHEFVLFILEEKMGATRRTFLTDLARKKGFRVENELTDEVTHIVAENLSRSEVLAWLKEHKMEKTKQFELLDISWLIESMKVGKPVDTKGKYQLAESVEVSANPDPTEGRVNELPPTMKTVSPYACQRRTTLNNRNQRFTDSLEILRENYELKGNDDTALEFRRAISVLKSLPFEVRSLKDTEGLPWISDEVKGIMEEIIEVGESREVQAVLNDEWYQSFHAFTRVFGVGVKTADKWYRMGLRTLEDVRSSKTLKLTPWQKVGLLYYEDLARGVTRAEADAIWLLVQDAVATFDPDAIVEIVGGFRRGKPQGHDVDLLISSPGAEKEQEDQLLQKVMNLWKKQGLLLCGRLEWSQWEDGGSPSGKADEGDAEASCFLILKLYDHLVRKSKRNMPTGSNMGESKPWKAIKVDLLRCPYGSFAFAMLQWTGSRMFRRDLRWYAREEKNMMLDNHSLYDMTRGIFLPAKSEEEIFEHLGLEYLEPFERNA

SEQ ID NO: 4285 - DNA, 1587 bp, synthetic construct
  misc_feature 1..1587: note = Variant of terminal deoxynucleotidyltransferase
  source 1..1587: mol_type = other DNA
atgcaccatcatcatcatcatggcggtagcggcagccacggcattcgtaccatcgattcggacttcgggaagaaacagcagaaaaaaggcgataaccacgatagttccgccacttatgaaatcaaatttcacgagtttgtgctgttcattctcgaagaaaaaatgggtgcgacgcgtcgtacttttctgacagatttagcccgcaagaaagggttccgcgtcgagaatgaactgaccgacgaagttacccacatcgtggcagaaaatctgtcacgctctgaagtattggcttggctgaaagaacacaagatggagaagaccaagcaattcgaactgctggatattagctggcttatcgaaagcatgaaagttggtaaaccggtggacaccaaggggaaataccagttggcggaatcggttgaggtgagtgcgaacccagatccgacagaaggtcgtgtaaacgagctgcctcctactatgaaaaccgtttctccgtatgcgtgtcaacgccgcaccaccctgaacaaccgtaatcaacgttttacggactcgctggagattcttcgtgaaaattacgagctgaaaggcaacgacgatactgcgctggaatttcgtcgtgctatctccgtgctgaaaagccttccgtttgaggtacgtagcctgaaagacacggaaggattgccctggatcagtgatgaagtcaaagggattatggaagaaatcatcgaagtcggggagtcgcgtgaagtgcaggccgtgctcaatgatgagtggtatcaaagcttccacgcatttacgcgtgtctttggagtgggggtgaagacagcagacaagtggtaccgtatgggtctgcgcaccctcgaggatgttcgttccagcaagaccctgaagttgaccccgtggcagaaagtaggtctgctgtattatgaagatcttgctcgcggcgttacgcgtgccgaagctgacgcgatttggctgctggttcaggatgcagtcgcaactttcgacccggatgcgatcgtggagattgtcggtggatttcgtcgtgggaaacctcagggtcacgacgttgatctgcttatcagttctccgggagctgagaaagagcaagaagaccaactcctgcagaaagtgatgaatctgtggaagaaacaagggttgttgctgtgtggtcgtctggaatggagtcagtgggaagatgggggttcgccttccggtaaggctgatgagggtgacgcggaggcgtcgtgctttctgatcctcaaactttatgatcatctggtgcgtaaaagtaaacgcaatatgccgactggttcgaacatgggcgagtccaaaccgtggaaagcaattaaagtagatctgctgcgttgccccaggggcagttttgcgtttgcgatgttgcagtggaccggaagccgcatgttccgtcgtgatctgcgctggtacgccctggaagagaagaacatgatgctggacaatcattcgctgtatgacatgacccgcggtatcttcctccctgctaaatcggaagaggaaattttcgaacatctggggcttgaatacctggaaccgttcgaacgtaacgca

SEQ ID NO: 4286 - protein, 529 aa, synthetic construct
  REGION 1..529: note = Variant of terminal deoxynucleotidyltransferase
MHHHHHHGGSGSHGIRTIDSDFGKKQQKKGDNHDSSATYEIKFHEFVLFILEEKMGATRRTFLTDLARKKGFRVENELTDEVTHIVAENLSRSEVLAWLKEHKMEKTKQFELLDISWLIESMKVGKPVDTKGKYQLAESVEVSANPDPTEGRVNELPPTMKTVSPYACQRRTTLNNRNQRFTDSLEILRENYELKGNDDTALEFRRAISVLKSLPFEVRSLKDTEGLPWISDEVKGIMEEIIEVGESREVQAVLNDEWYQSFHAFTRVFGVGVKTADKWYRMGLRTLEDVRSSKTLKLTPWQKVGLLYYEDLARGVTRAEADAIWLLVQDAVATFDPDAIVEIVGGFRRGKPQGHDVDLLISSPGAEKEQEDQLLQKVMNLWKKQGLLLCGRLEWSQWEDGGSPSGKADEGDAEASCFLILKLYDHLVRKSKRNMPTGSNMGESKPWKAIKVDLLRCPRGSFAFAMLQWTGSRMFRRDLRWYALEEKNMMLDNHSLYDMTRGIFLPAKSEEEIFEHLGLEYLEPFERNA

SEQ ID NO: 4287 - DNA, 1587 bp, synthetic construct
  misc_feature 1..1587: note = Variant of terminal deoxynucleotidyltransferase
  source 1..1587: mol_type = other DNA
atgcaccatcatcatcatcatggcggtagcggcagccacggcattcgtaccatcgattcggacttcgggaagaaacagcagaaaaaaggcgataaccacgatagttccgccacttatgaaatcaaatttcacgagtttgtgctgttcattctcgaagaaaaaatgggtgcgacgcgtcgtacttttctgacagatttagcccgcaagaaagggttccgcgtcgagaatgaactgaccgacgaagttacccacatcgtggcagaaaatctgtcacgctctgaagtattggcttggctgaaagaacacaagatggagaagaccaagcaattcgaactgctggatattagctggcttatcgaaagcatgaaagttggtaaaccggtggacaccaaggggaaataccagttggcggaatcggttgaggtgagtgcgaacccagatccgacagaaggtcgtgtaaacgagctgcctcctactatgaaaaccgtttctccgtatgcgtgtcaacgccgcaccaccctgaacaaccgtaatcaacgttttacggactcgctggagattcttcgtgaaaattacgagctgaaaggcaacgacgatactgcgctggaatttcgtcgtgctatctccgtgctgaaaagccttccgtttgaggtacgtagcctgaaagacacggaaggattgccctggatcagtgatgaagtcaaagggattatggaagaaatcatcgaagtcggggagtcgcgtgaagtgcaggccgtgctcaatgatgagtggtatcaaagcttccacgcatttacgcgtgtctttggagtgggggtgaagacagcagacaagtggtaccgtatgggtctgcgcaccctcgaggatgttcgttccagcaagaccctgaagttgaccccgtggcagaaagtaggtctgctgtattatgaagatcttgctcgcggcgttacgcgtgccgaagctgacgcgatttggctgctggttcaggatgcagtcgcaactttcgacccggatgcgatcgtggagattgtcggtggatttcgtcgtgggaaacctcagggtcacgacgttgatctgcttatcagttctccgggagctgaaaaagagcaagaagaccaactcctgcagaaagtgatgaatctgtggaagaaacaagggttgttgctgtgtggtcgtctggaatggagtcagtgggaatgggggggttcgccttccggtaaggctgatgagggtgacgcggaggcgtcgtgctttctgatcctcaaactttatgatcatctggtgcgtaaaagtaaacgcaatatgccgactggttcgaacatgggcgagtccaaaccgtggaaagcaattaaagtagatctgctgcgttgcccccgcggcagttttgcgtttgcgatgttgcagtggaccggaagccgcatgttccgtcgtgatctgcgctggtacgccctggaagagaagaacatgatgctggacaatcattcgctgtatgacatgagtcctggtatctttctccctgctaaatcggaagaggaaattttcgaacatctggggcttgaatacctggaaccgttcgaacgtaacgca

SEQ ID NO: 4288 - protein, 529 aa, synthetic construct
  REGION 1..529: note = Variant of terminal deoxynucleotidyltransferase
MHHHHHHGGSGSHGIRTIDSDFGKKQQKKGDNHDSSATYEIKFHEFVLFILEEKMGATRRTFLTDLARKKGFRVENELTDEVTHIVAENLSRSEVLAWLKEHKMEKTKQFELLDISWLIESMKVGKPVDTKGKYQLAESVEVSANPDPTEGRVNELPPTMKTVSPYACQRRTTLNNRNQRFTDSLEILRENYELKGNDDTALEFRRAISVLKSLPFEVRSLKDTEGLPWISDEVKGIMEEIIEVGESREVQAVLNDEWYQSFHAFTRVFGVGVKTADKWYRMGLRTLEDVRSSKTLKLTPWQKVGLLYYEDLARGVTRAEADAIWLLVQDAVATFDPDAIVEIVGGFRRGKPQGHDVDLLISSPGAEKEQEDQLLQKVMNLWKKQGLLLCGRLEWSQWEWGGSPSGKADEGDAEASCFLILKLYDHLVRKSKRNMPTGSNMGESKPWKAIKVDLLRCPRGSFAFAMLQWTGSRMFRRDLRWYALEEKNMMLDNHSLYDMSPGIFLPAKSEEEIFEHLGLEYLEPFERNA

SEQ ID NO: 4289 - DNA, 1587 bp, synthetic construct
  misc_feature 1..1587: note = Variant of terminal deoxynucleotidyltransferase
  source 1..1587: mol_type = other DNA
atgcaccatcatcatcatcatggcggtagcggcagccacggcattcgtaccatcgattcggacttcgggaagaaacagcagaaaaaaggcgataaccacgatagttccgccacttatgaaatcaaatttcacgagtttgtgctgttcattctcgaagaaaaaatgggtgcgacgcgtcgtacttttctgacagatttagcccgcaagaaagggttccgcgtcgagaatgaactgaccgacgaagttacccacatcgtggcagaaaatctgtcacgctctgaagtattggcttggctgaaagaacacaagatggagaagaccaagcaattcgaactgctggatattagctggcttatcgaaagcatgaaagttggtaaaccggtggacaccaaggggaaataccagttggcggaatcggttgaggtgagtgcgaacccagatccgacagaaggtcgtgtaaacgagctgcctcctactatgaaaaccgtttctccgtatgcgtgtcaacgccgcaccaccctgaacaaccgtaatcaacgttttacggactcgctggagattcttcgtgaaaattacgagctgaaaggcaacgacgatactgcgctggaatttcgtcgtgctatctccgtgctgaaaagccttccgtttgaggtacgtagcctgaaagacacggaaggattgccctggatcagtgatgaagtcaaagggattatggaagaaatcatcgaagtcggggagtcgcgtgaagtgcaggccgtgctcaatgatgagtggtatcaaagcttccacgcatttacgcgtgtctttggagtgggggtgaagacagcagacaagtggtaccgtatgggtctgcgcaccctcgaggatgttcgttccagcaagaccctgaagttgaccccgtggcagaaagtaggtctgctgtattatgaagatcttgctcgcggcgttacgcgtgccgaagctgacgcgatttggctgctggttcaggatgcagtcgcaactttcgacccggatgcgatcgtggagattgtcggtggatttcgtcgtgggaaacctcagggtcacgacgttgatctgcttatcagttctccgggagctgagaaagagcaagaagaccaactcctgcagaaagtgatgaatctgtggaagaaacaagggttgttgctgtgtggtcgtctggaatggagtcagtgggaagatgggaaatcgccttccggtaaggctgatgagggtgacgcggaggcgtcgtgctttctgatcctcaaactttatgatcatctggtgcgtaaaagtaaacgcaatatgccgactggttcgaacatgggcgagtccaaaccgtggaaagcaattaaagtagatctgctgcgttgcccctatggcagttttgcgtttgcgatgttgcagtggaccggaagccgcatgttccgtcgtgatctgcgcgactacgccctggaagagaagaacatgatgctggacacccattcgctgtatgacatgacccgcggtatcttcctccctgctaaatcggaagaggagattttcgaacatctggggcttgaatacctggaaccgttcgaacgtaacgca

SEQ ID NO: 4290 - protein, 529 aa, synthetic construct
  REGION 1..529: note = Variant of terminal deoxynucleotidyltransferase
MHHHHHHGGSGSHGIRTIDSDFGKKQQKKGDNHDSSATYEIKFHEFVLFILEEKMGATRRTFLTDLARKKGFRVENELTDEVTHIVAENLSRSEVLAWLKEHKMEKTKQFELLDISWLIESMKVGKPVDTKGKYQLAESVEVSANPDPTEGRVNELPPTMKTVSPYACQRRTTLNNRNQRFTDSLEILRENYELKGNDDTALEFRRAISVLKSLPFEVRSLKDTEGLPWISDEVKGIMEEIIEVGESREVQAVLNDEWYQSFHAFTRVFGVGVKTADKWYRMGLRTLEDVRSSKTLKLTPWQKVGLLYYEDLARGVTRAEADAIWLLVQDAVATFDPDAIVEIVGGFRRGKPQGHDVDLLISSPGAEKEQEDQLLQKVMNLWKKQGLLLCGRLEWSQWEDGKSPSGKADEGDAEASCFLILKLYDHLVRKSKRNMPTGSNMGESKPWKAIKVDLLRCPYGSFAFAMLQWTGSRMFRRDLRDYALEEKNMMLDTHSLYDMTRGIFLPAKSEEEIFEHLGLEYLEPFERNA

SEQ ID NO: 4291 - DNA, 1587 bp, synthetic construct
  misc_feature 1..1587: note = Variant of terminal deoxynucleotidyltransferase
  source 1..1587: mol_type = other DNA
atgcaccatcatcatcatcatggcggtagcggcagccacggcattcgtaccatcgattcggacttcgggaagaaacagcagaaaaaaggcgataaccacgatagttccgccacttatgaaatcaaatttcacgagtttgtgctgttcattctcgaagaaaaaatgggtgcgacgcgtcgtacttttctgacagatttagcccgcaagaaagggttccgcgtcgagaatgaactgaccgacgaagttacccacatcgtggcagaaaatctgtcacgctctgaagtattggcttggctgaaagaacacaagatggagaagaccaagcaattcgaactgctggatattagctggcttatcgaaagcatgaaagttggtaaaccggtggacaccaaggggaaataccagttggcggaatcggttgaggtgagtgcgaacccagatccgacagaaggtcgtgtaaacgagctgcctcctactatgaaaaccgtttctccgtatgcgtgtcaacgccgcaccaccctgaacaaccgtaatcaacgttttacggactcgctggagattcttcgtgaaaattacgagctgaaaggcaacgacgatactgcgctggaatttcgtcgtgctatctccgtgctgaaaagccttccgtttgaggtacgtagcctgaaagacacggaaggattgccctggatcagtgatgaagtcaaagggattatggaagaaatcatcgaagtcggggagtcgcgtgaagtgcaggccgtgctcaatgatgagtggtatcaaagcttccacgcatttacgcgtgtctttggagtgggggtgaagacagcagacaagtggtaccgtatgggtctgcgcaccctcgaggatgttcgttccagcaagaccctgaagttgaccccgtggcagaaagtaggtctgctgtattatgaagatcttgctcgcggcgttacgcgtgccgaagctgacgcgatttggctgctggttcaggatgcagtcgcaactttcgacccggatgcgatcgtggagattgtcggtggatttcgtcgtgggaaacctcagggtcacgacgttgatctgcttatcagttctccgggagctgagaaagagcaagaagaccaactcctgcagaaagtgatgaatctgtggaagaaacaagggttgttgctgtgtggtcgtctggaaactagtcagtgggaagatgggggttcgccttccggtaaggctgatgagggtgacgcggaggcgtcgtgctttctgatcctcaaactttatgatcatctggtgcgtaaaagtaaacgcaatatgccgactggttcgaacatgggcgagtccaaaccgtggaaagcaattaaagtagatctgctgcgttgcccctatggcagttttgcgtttgcgatgttgcagtggaccggaagccgcatgttccgtcgtgatctgcgccgctacgccctggaagagaagaacatgatgctggacaatcattcgctgtatgacatgacccgcggtatcttcctccctgctaaatcggaagaggagattttcgaacatctggggcttgaatacctggaaccgttcgaacgtaacgca

SEQ ID NO: 4292 - protein, 529 aa, synthetic construct
  REGION 1..529: note = Variant of terminal deoxynucleotidyltransferase
MHHHHHHGGSGSHGIRTIDSDFGKKQQKKGDNHDSSATYEIKFHEFVLFILEEKMGATRRTFLTDLARKKGFRVENELTDEVTHIVAENLSRSEVLAWLKEHKMEKTKQFELLDISWLIESMKVGKPVDTKGKYQLAESVEVSANPDPTEGRVNELPPTMKTVSPYACQRRTTLNNRNQRFTDSLEILRENYELKGNDDTALEFRRAISVLKSLPFEVRSLKDTEGLPWISDEVKGIMEEIIEVGESREVQAVLNDEWYQSFHAFTRVFGVGVKTADKWYRMGLRTLEDVRSSKTLKLTPWQKVGLLYYEDLARGVTRAEADAIWLLVQDAVATFDPDAIVEIVGGFRRGKPQGHDVDLLISSPGAEKEQEDQLLQKVMNLWKKQGLLLCGRLETSQWEDGGSPSGKADEGDAEASCFLILKLYDHLVRKSKRNMPTGSNMGESKPWKAIKVDLLRCPYGSFAFAMLQWTGSRMFRRDLRRYALEEKNMMLDNHSLYDMTRGIFLPAKSEEEIFEHLGLEYLEPFERNA

SEQ ID NO: 4293 - DNA, 1587 bp, synthetic construct
  misc_feature 1..1587: note = Variant of terminal deoxynucleotidyltransferase
  source 1..1587: mol_type = other DNA
atgcaccatcatcatcatcatggcggtagcggcagccacggcattcgtaccatcgattcggacttcgggaagaaacagcagaaaaaaggcgataaccacgatagttccgccacttatgaaatcaaatttcacgagtttgtgctgttcattctcgaagaaaaaatgggtgcgacgcgtcgtacttttctgacagatttagcccgcaagaaagggttccgcgtcgagaatgaactgaccgacgaagttacccacatcgtggcagaaaatctgtcacgctctgaagtattggcttggctgaaagaacacaagatggagaagaccaagcaattcgaactgctggatattagctggcttatcgaaagcatgaaagttggtaaaccggtggacaccaaggggaaataccagttggcggaatcggttgaggtgagtgcgaacccagatccgacagaaggtcgtgtaaacgagctgcctcctactatgaaaaccgtttctccgtatgcgtgtcaacgccgcaccaccctgaacaaccgtaatcaacgttttacggactcgctggagattcttcgtgaaaattacgagctgaaaggcaacgacgatactgcgctgcgttttcgtcgtgctatctccgtgctgaaaagccttccgtttgaggtacgtagcctgaaagacacggaaggattgccctggatcagtgatgaagtcaaagggattatggaagaaatcatcgaagtcggggagtcgcgtgaagtgcaggccgtgctcaatgatgagtggtatcaaagcttccacgcatttacgcgtgtctttggagtgggggtgaagacagcagacaagtggtaccgtatgggtctgcgcaccctcgaggatgttcgttccagcaagaccctgaagttgaccccgtggcagaaagtaggtctgctgtattatgaagatcttgctcgcggcgttacgcgtgccgaagctgacgcgatttggctgctggttcaggatgcagtcgcaactttcgacccggatgcgatcgtggagattgtcggtggatttcgtcgtgggaaacctcagggtcacgacgttgatctgcttatcagttctccgggagctgaaaaagagcaagaagaccaactcctgcagaaagtgatgaatctgtggaagaaacaagggttgttgctgtgtggtcgtctggaatggagtcagtgggaagacgggggttcgccttccggtaaggctgatgagggtgacgcggaggcgtcgtgctttctgatcctcaaactttatgatcatctggtgcgtaaaagtaaacgcaatatgccgactggttcgaacatgggcgagtccaaaccgtggaaagcaattaaagtagatctgctgcgttgcccccgcggcagttttgcgtttgcgatgttgcagtggaccggaagccgcatgttccgtcgtgatctgcgctggtacgccctggaagagaagaacatgatgctggacaatcattcgctgtatgacatgagtcgtggtatctttctccctgctaaatcggaagaggaaattttcgaacatctggggcttgaatacctggaaccgttcgaacgtaacgca

SEQ ID NO: 4294 - protein, 529 aa, synthetic construct
  REGION 1..529: note = Variant of terminal deoxynucleotidyltransferase
MHHHHHHGGSGSHGIRTIDSDFGKKQQKKGDNHDSSATYEIKFHEFVLFILEEKMGATRRTFLTDLARKKGFRVENELTDEVTHIVAENLSRSEVLAWLKEHKMEKTKQFELLDISWLIESMKVGKPVDTKGKYQLAESVEVSANPDPTEGRVNELPPTMKTVSPYACQRRTTLNNRNQRFTDSLEILRENYELKGNDDTALRFRRAISVLKSLPFEVRSLKDTEGLPWISDEVKGIMEEIIEVGESREVQAVLNDEWYQSFHAFTRVFGVGVKTADKWYRMGLRTLEDVRSSKTLKLTPWQKVGLLYYEDLARGVTRAEADAIWLLVQDAVATFDPDAIVEIVGGFRRGKPQGHDVDLLISSPGAEKEQEDQLLQKVMNLWKKQGLLLCGRLEWSQWEDGGSPSGKADEGDAEASCFLILKLYDHLVRKSKRNMPTGSNMGESKPWKAIKVDLLRCPRGSFAFAMLQWTGSRMFRRDLRWYALEEKNMMLDNHSLYDMSRGIFLPAKSEEEIFEHLGLEYLEPFERNA

SEQ ID NO: 4295 - DNA, 1587 bp, synthetic construct
  misc_feature 1..1587: note = Variant of terminal deoxynucleotidyltransferase
  source 1..1587: mol_type = other DNA
atgcaccatcatcatcatcatggcggtagcggcagccacggcattcgtaccatcgattcggacttcgggaagaaacagcagaaaaaaggcgataaccacgatagttccgccacttatgaaatcaaatttcacgagtttgtgctgttcattctcgaagaaaaaatgggtgcgacgcgtcgtacttttctgacagatttagcccgcaagaaagggttccgcgtcgagaatgaactgaccgacgaagttacccacatcgtggcagaaaatctgtcacgctctgaagtattggcttggctgaaagaacacaagatggagaagaccaagcaattcgaactgctggatattagctggcttatcgaaagcatgaaagttggtaaaccggtggacaccaaggggaaataccagttggcggaatcggttgaggtgagtgcgaacccagatccgacagaaggtcgtgtaaacgagctgcctcctactatgaaaaccgtttctccgtatgcgtgtcaacgccgcaccaccctgaacaaccgtaatcaacgttttacggactcgctggagattcttcgtgaaaattacgagctgaaaggcaacgacgatactgcgctggaatttcgtcgtgctatctccgtgctgaaaagccttccgtttgagttgcgtagcctgaaagacacggaaggattgccctggatcagtgatgaagtcaaagggattatggaagaaatcatcgaagtcggggagtcgcgtgaagtgcaggccgtgctcaatgatgagtggtatcaaagcttccacgcatttacgcgtgtctttggagtgggggtgaagacagcagacaagtggtaccgtatgggtctgcgcaccctcgaggatgttcgttccagcaagaccctgaagttgaccccgtggcagaaagtaggtctgctgtattatgaagatcttgctcgcggcgttacgcgtgccgaagctgacgcgatttggctgctggttcaggatgcagtcgcaactttcgacccggatgcgatcgtggagattgtcggtggatttcgtcgtgggaaacctcagggtcacgacgttgatctgcttatcagttctccgggagctgagaaagagcaagaagaccaactcctgcagaaagtgatgaatctgtggaagaaacaagggttgttgctgtgtggtcgtctggaatggagtcagtgggaagatgggggttcgccttccggtaaggctgatgagggtgacgcggaggcgtcgtgctttctgatcctcaaactttatgatcatctggtgcgtaaaagtaaacgcaatatgccgactggttcgaacatgggcgagtccaaaccgtggaaagcaattaaagtagatctgctgcgttgcccctatggcagttttgcgtttgcgatgttgcagtggaccggaagccgcatgttccgtcgtgatctgcgctggtacgccctggaagagaagaacatgatgctggacaatcattcgctgtatgacatgacccgcggtatcttcctccctgctaaatcggaagaggaaattttcgaacatctggggcttgaatacctggaaccgttcgaacgtaacgca

SEQ ID NO: 4296 - protein, 529 aa, synthetic construct
  REGION 1..529: note = Variant of terminal deoxynucleotidyltransferase
MHHHHHHGGSGSHGIRTIDSDFGKKQQKKGDNHDSSATYEIKFHEFVLFILEEKMGATRRTFLTDLARKKGFRVENELTDEVTHIVAENLSRSEVLAWLKEHKMEKTKQFELLDISWLIESMKVGKPVDTKGKYQLAESVEVSANPDPTEGRVNELPPTMKTVSPYACQRRTTLNNRNQRFTDSLEILRENYELKGNDDTALEFRRAISVLKSLPFELRSLKDTEGLPWISDEVKGIMEEIIEVGESREVQAVLNDEWYQSFHAFTRVFGVGVKTADKWYRMGLRTLEDVRSSKTLKLTPWQKVGLLYYEDLARGVTRAEADAIWLLVQDAVATFDPDAIVEIVGGFRRGKPQGHDVDLLISSPGAEKEQEDQLLQKVMNLWKKQGLLLCGRLEWSQWEDGGSPSGKADEGDAEASCFLILKLYDHLVRKSKRNMPTGSNMGESKPWKAIKVDLLRCPYGSFAFAMLQWTGSRMFRRDLRWYALEEKNMMLDNHSLYDMTRGIFLPAKSEEEIFEHLGLEYLEPFERNA

SEQ ID NO: 4297 - DNA, 1587 bp, synthetic construct
  misc_feature 1..1587: note = Variant of terminal deoxynucleotidyltransferase
  source 1..1587: mol_type = other DNA
atgcaccatcatcatcatcatggcggtagcggcagccacggcattcgtaccatcgattcggacttcgggaagaaacagcagaaaaaaggcgataaccacgatagttccgccacttatgaaatcaaatttcacgagtttgtgctgttcattctcgaagaaaaaatgggtgcgacgcgtcgtacttttctgacagatttagcccgcaagaaagggttccgcgtcgagaatgaactgaccgacgaagttacccacatcgtggcagaaaatctgtcacgctctgaagtattggcttggctgaaagaacacaagatggagaagaccaagcaattcgaactgctggatattagctggcttatcgaaagcatgaaagttggtaaaccggtggacaccaaggggaaataccagttggcggaatcggttgaggtgagtgcgaacccagatccgacagaaggtcgtgtaaacgagctgcctcctactatgaaaaccgtttctccgtatgcgtgtcaacgccgcaccaccctgaacaaccgtaatcaacgttttacggactcgctggagattcttcgtgaaaattacgagctgaaaggcaacgacgatactgcgctggaatttcgtcgtgctatctccgtgctgaaaagccttccgtttgaggtacgtagcctgaaagacacggaaggattgccctggatcagtgatgaagtcaaagggattatggaagaaatcatcgaagtcggggagtcgcgtgaagtgcaggccgtgctcaatgatgagtggtatcaaagcttccacgcatttacgcgtgtctttggagtgggggtgaagacagcagacaagtggtaccgtatgggtctgcgcaccctcgaggatgttcgttccagcaagaccctgaagttgaccccgtggcagaaagtaggtctgctgtattatgaagatcttgctcgcggcgttacgcgtgccgaagctgacgcgatttggctgctggttcaggatgcagtcgcaactttcgacccggatgcgatcgtggagattgtcggtggatttcgtcgtgggaaacctcagggtcacgacgttgatctgcttatcagttctccgggagctgagaaagagcaagaagaccaactcctgcagaaagtgatgaatctgtggaagaaacaagggttgttgctgtgtggtcgtctggaatggagtcagtgggaagatgggcgctcgccttccggtaaggctgatgagggtgacgcggaggcgtcgtgctttctgatcctcaaactttatgatcatctggtgcgtaaaagtaaacgcaatatgccgactggttcgaacatgggcgagtccaaaccgtggaaagcaattaaagtagatctgctgcgttgcccctatggcagttttgcgtttgcgatgttgcagtggaccggaagccgcatgttccgtcgtgatctgcgctggtacgcccgtgaagagaagaacatgatgctggacacccattcgctgtatgacatgacccgcggtatcttcctccctgctaaatcggaagaggaaattttcgaacatctggggcttgaatacctggaaccgttcgaacgtaacgca

SEQ ID NO: 4298 - protein, 529 aa, synthetic construct
  REGION 1..529: note = Variant of terminal deoxynucleotidyltransferase
MHHHHHHGGSGSHGIRTIDSDFGKKQQKKGDNHDSSATYEIKFHEFVLFILEEKMGATRRTFLTDLARKKGFRVENELTDEVTHIVAENLSRSEVLAWLKEHKMEKTKQFELLDISWLIESMKVGKPVDTKGKYQLAESVEVSANPDPTEGRVNELPPTMKTVSPYACQRRTTLNNRNQRFTDSLEILRENYELKGNDDTALEFRRAISVLKSLPFEVRSLKDTEGLPWISDEVKGIMEEIIEVGESREVQAVLNDEWYQSFHAFTRVFGVGVKTADKWYRMGLRTLEDVRSSKTLKLTPWQKVGLLYYEDLARGVTRAEADAIWLLVQDAVATFDPDAIVEIVGGFRRGKPQGHDVDLLISSPGAEKEQEDQLLQKVMNLWKKQGLLLCGRLEWSQWEDGRSPSGKADEGDAEASCFLILKLYDHLVRKSKRNMPTGSNMGESKPWKAIKVDLLRCPYGSFAFAMLQWTGSRMFRRDLRWYAREEKNMMLDTHSLYDMTRGIFLPAKSEEEIFEHLGLEYLEPFERNA

SEQ ID NO: 4299 - DNA, 1587 bp, synthetic construct
  misc_feature 1..1587: note = Variant of terminal deoxynucleotidyltransferase
  source 1..1587: mol_type = other DNA
atgcaccatcatcatcatcatggcggtagcggcagccacggcattcgtaccatcgattcggacttcgggaagaaacagcagaaaaaaggcgataaccacgatagttccgccacttatgaaatcaaatttcacgagtttgtgctgttcattctcgaagaaaaaatgggtgcgacgcgtcgtacttttctgacagatttagcccgcaagaaagggttccgcgtcgagaatgaactgaccgacgaagttacccacatcgtggcagaaaatctgtcacgctctgaagtattggcttggctgaaagaacacaagatggagaagaccaagcaattcgaactgctggatattagctggcttatcgaaagcatgaaagttggtaaaccggtggacaccaaggggaaataccagttggcggaatcggttgaggtgagtgcgaacccagatccgacagaaggtcgtgtaaacgagctgcctcctactatgaaaaccgtttctccgtatgcgtgtcaacgccgcaccaccctgaacaaccgtaatcaacgttttacggactcgctggagattcttcgtgaaaattacgagctgaaaggcaacgacgatactgcgctggaatttcgtcgtgctatctccgtgctgaaaagccttccgtttgaggtacgtagcctgaaagacacggaaggattgccctggatcagtgatgaagtcaaagggattatggaagaaatcatcgaagtcggggagtcgcgtgaagtgcaggccgtgctcaatgatgagtggtatcaaagcttccacgcatttacgcgtgtctttggagtgggggtgaagacagcagacaagtggtaccgtatgggtctgcgcaccctcgaggatgttcgttccagcaagaccctgaagttgaccccgtggcagaaagtaggtctgctgtattatgaagatcttgctcgcggcgttacgcgtgccgaagctgacgcgatttggctgctggttcaggatgcagtcgcaactttcgacccggatgcgatcgtggagattgtcggtggatttcgtcgtgggaaacctcagggtcacgacgttgatctgcttatcagttctccgggagctgaaaaagagcaagaagaccaactcctgcagaaagtgatgaatctgtggaagaaacaagggttgttgctgtgtggtcgtctggaatggagtcagtgggaatgggggggttcgccttccggtaaggctgatgagggtgacgcggaggcgtcgtgctttctgatcctcaaactttatgatcatctggtgcgtaaaagcaaacgcaatatgccgactggttcgaacatgggcgagtccaaaccgtggaaagcaattaaagtagatctgctgcgttgccccgtcggcagttttgcgtttgcgatgttgcagtggaccggaagccgcatgttccgtcgtgatctgcgctggtacgccctggaagagaagaacatgatgctggacaatcattcgctgtatgacatgactcctggtatcggtctccctgctaaatcggaagaggaaattttcgaacatctggggcttgaatacctggaaccgttcgaacgtaacgca

SEQ ID NO: 4300 - protein, 529 aa, synthetic construct
  REGION 1..529: note = Variant of terminal deoxynucleotidyltransferase
MHHHHHHGGSGSHGIRTIDSDFGKKQQKKGDNHDSSATYEIKFHEFVLFILEEKMGATRRTFLTDLARKKGFRVENELTDEVTHIVAENLSRSEVLAWLKEHKMEKTKQFELLDISWLIESMKVGKPVDTKGKYQLAESVEVSANPDPTEGRVNELPPTMKTVSPYACQRRTTLNNRNQRFTDSLEILRENYELKGNDDTALEFRRAISVLKSLPFEVRSLKDTEGLPWISDEVKGIMEEIIEVGESREVQAVLNDEWYQSFHAFTRVFGVGVKTADKWYRMGLRTLEDVRSSKTLKLTPWQKVGLLYYEDLARGVTRAEADAIWLLVQDAVATFDPDAIVEIVGGFRRGKPQGHDVDLLISSPGAEKEQEDQLLQKVMNLWKKQGLLLCGRLEWSQWEWGGSPSGKADEGDAEASCFLILKLYDHLVRKSKRNMPTGSNMGESKPWKAIKVDLLRCPVGSFAFAMLQWTGSRMFRRDLRWYALEEKNMMLDNHSLYDMTPGIGLPAKSEEEIFEHLGLEYLEPFERNA

SEQ ID NO: 4301 - DNA, 1587 bp, synthetic construct
  misc_feature 1..1587: note = Variant of terminal deoxynucleotidyltransferase
  source 1..1587: mol_type = other DNA
atgcaccatcatcatcatcatggcggtagcggcagccacggcattcgtaccatcgattcggacttcgggaagaaacagcagaaaaaaggcgataaccacgatagttccgccacttatgaaatcaaatttcacgagtttgtgctgttcattctcgaagaaaaaatgggtgcgacgcgtcgtacttttctgacagatttagcccgcaagaaagggttccgcgtcgagaatgaactgaccgacgaagttacccacatcgtggcagaaaatctgtcacgctctgaagtattggcttggctgaaagaacacaagatggagaagaccaagcaattcgaactgctggatattagctggcttatcgaaagcatgaaagttggtaaaccggtggacaccaaggggaaataccagttggcggaatcggttgaggtgagtgcgaacccagatccgacagaaggtcgtgtaaacgagctgcctcctactatgaaaaccgtttctccgtatgcgtgtcaacgccgcaccaccctgaacaaccgtaatcaacgttttacggactcgctggagattcttcgtgaaaattacgagctgaaaggcaacgacgatactgcgctggaatttcgtcgtgctatctccgtgctgaaaagccttccgtttgaggtacgtagcctgaaagacacggaaggattgccctggatcagtgatgaagtcaaagggattatggaagaaatcatcgaagtcggggagtcgcgtgaagtgcaggccgtgctcaatgatgagtggtatcaaagcttccacgcatttacgcgtgtctttggagtgggggtgaagacagcagacaagtggtaccgtatgggtctgcgcaccctcgaggatgttcgttccagcaagaccctgaagttgaccccgtggcagaaagtaggtctgctgtattatgaagatcttgctcgcggcgttacgcgtgccgaagctgacgcgatttggctgctggttcaggatgcagtcgcaactgtcgacccggatgcgatcgtggagattgtcggtggatttcgtcgtgggaaacctcagggtcacgacgttgatctgcttatcagttctccgggagctgagaaagagcaagaagaccaactcctgcagaaagtgatgaatctgtggaagaaacaagggttgttgctgtgtggtcgtctggaatggagtcagtgggaagatgggaaatcgccttccggtaaggctgatgagggtgacgcggaggcgtcgtgctttctgatcctcaaactttatgatcatctggtgcgtaaaagtaaacgcaatatgccgactggttcgaacatgggcgagtccaaaccgtggaaagcaattaaagtagatctgctgcgttgcccctatggcagttttgcgtttgcgatgttgcagtggaccggaagccgcatgttccgtcgtgatctgcgccgctacgccgaagaagagaagaacatgatgctggacaaccattcgctgtatgacatgacccgcggtatcttcctccctgctaaatcggaagaggaaattttcgaacatctggggcttgaatacctggaaccgttcgaacgtaacgca

SEQ ID NO: 4302 - protein, 529 aa, synthetic construct
  REGION 1..529: note = Variant of terminal deoxynucleotidyltransferase
MHHHHHHGGSGSHGIRTIDSDFGKKQQKKGDNHDSSATYEIKFHEFVLFILEEKMGATRRTFLTDLARKKGFRVENELTDEVTHIVAENLSRSEVLAWLKEHKMEKTKQFELLDISWLIESMKVGKPVDTKGKYQLAESVEVSANPDPTEGRVNELPPTMKTVSPYACQRRTTLNNRNQRFTDSLEILRENYELKGNDDTALEFRRAISVLKSLPFEVRSLKDTEGLPWISDEVKGIMEEIIEVGESREVQAVLNDEWYQSFHAFTRVFGVGVKTADKWYRMGLRTLEDVRSSKTLKLTPWQKVGLLYYEDLARGVTRAEADAIWLLVQDAVATVDPDAIVEIVGGFRRGKPQGHDVDLLISSPGAEKEQEDQLLQKVMNLWKKQGLLLCGRLEWSQWEDGKSPSGKADEGDAEASCFLILKLYDHLVRKSKRNMPTGSNMGESKPWKAIKVDLLRCPYGSFAFAMLQWTGSRMFRRDLRRYAEEEKNMMLDNHSLYDMTRGIFLPAKSEEEIFEHLGLEYLEPFERNA

SEQ ID NO: 4303 - DNA, 1587 bp, synthetic construct
  misc_feature 1..1587: note = Variant of terminal deoxynucleotidyltransferase
  source 1..1587: mol_type = other DNA
atgcaccatcatcatcatcatggcggtagcggcagccacggcattcgtaccatcgattcggacttcgggaagaaacagcagaaaaaaggcgataaccacgatagttccgccacttatgaaatcaaatttcacgagtttgtgctgttcattctcgaagaaaaaatgggtgcgacgcgtcgtacttttctgacagatttagcccgcaagaaagggttccgcgtcgagaatgaactgaccgacgaagttacccacatcgtggcagaaaatctgtcacgctctgaagtattggcttggctgaaagaacacaagatggagaagaccaagcaattcgaactgctggatattagctggcttatcgaaagcatgaaagttggtaaaccggtggacaccaaggggaaataccagttggcggaatcggttgaggtgagtgcgaacccagatccgacagaaggtcgtgtaaacgagctgcctcctactatgaaaaccgtttctccgtatgcgtgtcaacgccgcaccaccctgaacaaccgtaatcaacgttttacggactcgctggagattcttcgtgaaaattacgagctgaaaggcaacgacgatactgcgctggaatttcgtcgtgctatctccgtgctgaaaagccttccgtttgaggtacgtagcctgaaagacacggaaggattgccctggatcagtgatgaagtcaaagggattatggaagaaatcatcgaagtcggggagtcgcgtgaagtgcaggccgtgctcaatgatgagtggtatcaaagcttccacgcatttacgcgtgtctttggagtgggggtgaagacagcagacaagtggtaccgtatgggtctgcgcaccctcgaggatgttcgttccagcaagaccctgaagttgaccccgtggcagaaagtaggtctgctgtattatgaagatcttgctcgcggcgttacgcgtgccgaagctgacgcgatttggctgctggttcaggatgcagtcgcaactttcgacccggatgcgatcgtggagattgtcggtggatttcgtcgtgggaaacctcagggtcacgacgttgatctgcttatcagttctccgggagctgagaaagagcaagaagaccaactcctgcagaaagtgatgaatctgtggaagaaacaagggttgttgctgtgtggtcgtctggaatggagtcagtgggaagatgggggttcgccttccggtaaggctgatgagggtgacgcggaggcgtcgtgctttctgatcctcaaactttatgatcatctggtgcgtaaaagtaaacgcaatatgccgactggttcgaacatgggcgagtccaaaccgtggaaagcaattaaagtagatctgctgcgttgcccctatggcagttttgcgtttgcgatgttgcagtggaccggaagccgcatgttccgtcgtgatctgcgctggtacgccgaagaagagaagaacatgatgctggacaatcattcgctgtatgacatgacccgcggtatcttcctccctgctaaatcggaagaggagattttcgaacatctggggcttgaatacctggaaccgttcgaacgtaacgca

SEQ ID NO: 4304 - protein, 529 aa, synthetic construct
  REGION 1..529: note = Variant of terminal deoxynucleotidyltransferase
MHHHHHHGGSGSHGIRTIDSDFGKKQQKKGDNHDSSATYEIKFHEFVLFILEEKMGATRRTFLTDLARKKGFRVENELTDEVTHIVAENLSRSEVLAWLKEHKMEKTKQFELLDISWLIESMKVGKPVDTKGKYQLAESVEVSANPDPTEGRVNELPPTMKTVSPYACQRRTTLNNRNQRFTDSLEILRENYELKGNDDTALEFRRAISVLKSLPFEVRSLKDTEGLPWISDEVKGIMEEIIEVGESREVQAVLNDEWYQSFHAFTRVFGVGVKTADKWYRMGLRTLEDVRSSKTLKLTPWQKVGLLYYEDLARGVTRAEADAIWLLVQDAVATFDPDAIVEIVGGFRRGKPQGHDVDLLISSPGAEKEQEDQLLQKVMNLWKKQGLLLCGRLEWSQWEDGGSPSGKADEGDAEASCFLILKLYDHLVRKSKRNMPTGSNMGESKPWKAIKVDLLRCPYGSFAFAMLQWTGSRMFRRDLRWYAEEEKNMMLDNHSLYDMTRGIFLPAKSEEEIFEHLGLEYLEPFERNA

SEQ ID NO: 4305 - DNA, 1587 bp, synthetic construct
  misc_feature 1..1587: note = Variant of terminal deoxynucleotidyltransferase
  source 1..1587: mol_type = other DNA
atgcaccatcatcatcatcatggcggtagcggcagccacggcattcgtaccatcgattcggacttcgggaagaaacagcagaaaaaaggcgataaccacgatagttccgccacttatgaaatcaaatttcacgagtttgtgctgttcattctcgaagaaaaaatgggtgcgacgcgtcgtacttttctgacagatttagcccgcaagaaagggttccgcgtcgagaatgaactgaccgacgaagttacccacatcgtggcagaaaatctgtcacgctctgaagtattggcttggctgaaagaacacaagatggagaagaccaagcaattcgaactgctggatattagctggcttatcgaaagcatgaaagttggtaaaccggtggacaccaaggggaaataccagttggcggaatcggttgaggtgagtgcgaacccagatccgacagaaggtcgtgtaaacgagctgcctcctactatgaaaaccgtttctccgtatgcgtgtcaacgccgcaccaccctgaacaaccgtaatcaacgttttacggactcgctggagattcttcgtgaaaattacgagctgaaaggcaacgacgatactgcgctggaatttcgtcgtgctatctccgtgctgaaaagccttccgtttgaggtacgtagcctgaaagacacggaaggattgccctggatcagtgatgaagtcaaagggattatggaagaaatcatcgaagtcggggagtcgcgtgaagtgcaggccgtgctcaatgatgagtggtatcaaagcttccacgcatttacgcgtgtctttggagtgggggtgaagacagcagacaagtggtaccgtatgggtctgcgcaccctcgaggatgttcgttccagcaagaccctgaagttgaccccgtggcagaaagtaggtctgctgtattatgaagatcttgctcgcggcgttacgcgtgccgaagctgacgcgatttggctgctggttcaggatgcagtcgcaactgtcgacccagatgcgatcgtggagattgtcggtggatttcgtcgtgggaaacctcagggtcacgacgttgatctgcttatcagttctccgggagctgagaaagagcaagaagaccaactcctgcagaaagtgatgaatctgtggaagaaacaagggttgttgctgtgtggtcgtctggaatggagtcagtgggaagatgggaaatcgccttccggtaaggctgatgagggtgacgcggaggcgtcgtgctttctgatcctcaaactttatgatcatctggtgcgtaaaagtaaacgcaatatgccgactggttcgaacatgggcgagtccaaaccgtggaaagcaattaaagtagatctgctgcgttgcccctatggcagttttgcgtttgcgatgttgcagtggaccggaagccgcatgttccgtcgtgatctgcgctggtacgccctggaagagaagaacatgatgctggacaatcattcgctgtatgacatgacccgcggtatcttcctccctgctaaatcggaagagcgcattttcgaacatctggggcttgaatacctggaaccgttcgaacgtaacgca

SEQ ID NO: 4306 - protein, 529 aa, synthetic construct
  REGION 1..529: note = Variant of terminal deoxynucleotidyltransferase
MHHHHHHGGSGSHGIRTIDSDFGKKQQKKGDNHDSSATYEIKFHEFVLFILEEKMGATRRTFLTDLARKKGFRVENELTDEVTHIVAENLSRSEVLAWLKEHKMEKTKQFELLDISWLIESMKVGKPVDTKGKYQLAESVEVSANPDPTEGRVNELPPTMKTVSPYACQRRTTLNNRNQRFTDSLEILRENYELKGNDDTALEFRRAISVLKSLPFEVRSLKDTEGLPWISDEVKGIMEEIIEVGESREVQAVLNDEWYQSFHAFTRVFGVGVKTADKWYRMGLRTLEDVRSSKTLKLTPWQKVGLLYYEDLARGVTRAEADAIWLLVQDAVATVDPDAIVEIVGGFRRGKPQGHDVDLLISSPGAEKEQEDQLLQKVMNLWKKQGLLLCGRLEWSQWEDGKSPSGKADEGDAEASCFLILKLYDHLVRKSKRNMPTGSNMGESKPWKAIKVDLLRCPYGSFAFAMLQWTGSRMFRRDLRWYALEEKNMMLDNHSLYDMTRGIFLPAKSEERIFEHLGLEYLEPFERNA

SEQ ID NO: 4307 - DNA, 1587 bp, synthetic construct
  misc_feature 1..1587: note = Variant of terminal deoxynucleotidyltransferase
  source 1..1587: mol_type = other DNA
atgcaccatcatcatcatcatggcggtagcggcagccacggcattcgtaccatcgattcggacttcgggaagaaacagcagaaaaaaggcgataaccacgatagttccgccacttatgaaatcaaatttcacgagtttgtgctgttcattctcgaagaaaaaatgggtgcgacgcgtcgtacttttctgacagatttagcccgcaagaaagggttccgcgtcgagaatgaactgaccgacgaagttacccacatcgtggcagaaaatctgtcacgctctgaagtattggcttggctgaaagaacacaagatggagaagaccaagcaattcgaactgctggatattagctggcttatcgaaagcatgaaagttggtaaaccggtggacaccaaggggaaataccagttggcggaatcggttgaggtgagtgcgaacccagatccgacagaaggtcgtgtaaacgagctgcctcctactatgaaaaccgtttctccgtatgcgtgtcaacgccgcaccaccctgaacaaccgtaatcaacgttttacggactcgctggagattcttcgtgaaaattacgagctgaaaggcaacgacgatactgcgctgcgttttcgtcgtgctatctccgtgctgaaaagccttccgtttgaggtacgtagcctgaaagacacggaaggattgccctggatcagtgatgaagtcaaagggattatggaagaaatcatcgaagtcggggagtcgcgtgaagtgcaggccgtgctcaatgatgagtggtatcaaagcttccacgcatttacgcgtgtctttggagtgggggtgaagacagcagacaagtggtaccgtatgggtctgcgcaccctcgaggatgttcgttccagcaagaccctgaagttgaccccgtggcagaaagtaggtctgctgtattatgaagatcttgctcgcggcgttacgcgtgccgaagctgacgcgatttggctgctggttcaggatgcagtcgcaactttcgacccggatgcgatcgtggagattgtcggtggatttcgtcgtgggaaacctcagggtcacgacgttgatctgcttatcagttctccgggagctgaaaaagagcaagaagaccaactcctgcagaaagtgatgaatctgtggaagaaacaagggttgttgctgtgtggtcgtctggaatggagtcagtgggaagacgggggttcgccttccggtaaggctgatgagggtgacgcggaggcgtcgtgctttctgatcctcaaactttatgatcatctggtgcgtaaaagtaaacgcaatatgccgactggttcgaacatgggcgagtccaaaccgtggaaagcaattaaagtagatctgctgcgttgcccccgcggcagttttgcgtttgcgatgttgcagtggaccggaagccgcatgttccgtcgtgatctgcgctggtacgccctggaagagaagaacatgatgctggacaatcattcgctgtatgaccgtactcgtggtatcggtctccctgctaaatcggaagaggaaattttcgaacatctggggcttgaatacctggaaccgttcgaacgtaacgca

SEQ ID NO: 4308 - protein, 529 aa, synthetic construct
  REGION 1..529: note = Variant of terminal deoxynucleotidyltransferase
MHHHHHHGGSGSHGIRTIDSDFGKKQQKKGDNHDSSATYEIKFHEFVLFILEEKMGATRRTFLTDLARKKGFRVENELTDEVTHIVAENLSRSEVLAWLKEHKMEKTKQFELLDISWLIESMKVGKPVDTKGKYQLAESVEVSANPDPTEGRVNELPPTMKTVSPYACQRRTTLNNRNQRFTDSLEILRENYELKGNDDTALRFRRAISVLKSLPFEVRSLKDTEGLPWISDEVKGIMEEIIEVGESREVQAVLNDEWYQSFHAFTRVFGVGVKTADKWYRMGLRTLEDVRSSKTLKLTPWQKVGLLYYEDLARGVTRAEADAIWLLVQDAVATFDPDAIVEIVGGFRRGKPQGHDVDLLISSPGAEKEQEDQLLQKVMNLWKKQGLLLCGRLEWSQWEDGGSPSGKADEGDAEASCFLILKLYDHLVRKSKRNMPTGSNMGESKPWKAIKVDLLRCPRGSFAFAMLQWTGSRMFRRDLRWYALEEKNMMLDNHSLYDRTRGIGLPAKSEEEIFEHLGLEYLEPFERNA

SEQ ID NO: 4309 - DNA, 1587 bp, synthetic construct
  misc_feature 1..1587: note = Variant of terminal deoxynucleotidyltransferase
  source 1..1587: mol_type = other DNA
atgcaccatcatcatcatcatggcggtagcggcagccacggcattcgtaccatcgattcggacttcgggaagaaacagcagaaaaaaggcgataaccacgatagttccgccacttatgaaatcaaatttcacgagtttgtgctgttcattctcgaagaaaaaatgggtgcgacgcgtcgtacttttctgacagatttagcccgcaagaaagggttccgcgtcgagaatgaactgaccgacgaagttacccacatcgtggcagaaaatctgtcacgctctgaagtattggcttggctgaaagaacacaagatggagaagaccaagcaattcgaactgctggatattagctggcttatcgaaagcatgaaagttggtaaaccggtggacaccaaggggaaataccagttggcggaatcggttgaggtgagtgcgaacccagatccgacagaaggtcgtgtaaacgagctgcctcctactatgaaaaccgtttctccgtatgcgtgtcaacgccgcaccaccctgaacaaccgtaatcaacgttttacggactcgctggagattcttcgtgaaaattacgagctgaaaggcaacgacgatactgcgctggaatttcgtcgtgctatctccgtgctgaaaagccttccgtttgaggtacgtagcctgaaagacacggaaggattgccctggatcagtgatgaagtcaaagggattatggaagaaatcatcgaagtcggggagtcgcgtgaagtgcaggccgtgctcaatgatgagtggtatcaaagcttccacgcatttacgcgtgtctttggagtgggggtgaagacagcagacaagtggtaccgtatgggtctgcgcaccctcgaggatgttcgttccagcaagaccctgaagttgaccccgtggcagaaagtaggtctgctgtattatgaagatcttgctcgcggcgttacgcgtgccgaagctgacgcgatttggctgctggttcaggatgcagtcgcaactgtcgacccggatgcgatcgtggagattgtcggtggatttcgtcgtgggaaacctcagggtcacgacgttgatctgcttatcagttctccgggagctgagaaagagcaagaagaccaactcctgcagaaagtgatgaatctgtggaagaaacaagggttgttgctgtgtggtcgtctggaatggagtcagtgggaagatgggggctcgccttccggtaaggctgatgagggtgacgcggaggcgtcgtgctttctgatcctcaaactttatgatcatctggtgcgtaaaagtaaacgcaatatgccgactggttcgaacatgggcgagtccaaaccgtggaaagcaattaaagtagatctgctgcgttgcccctatggcagttttgcgtttgcgatgttgcagtggaccggaagccgcatgttccgtcgtgatctgcgccgctacgccctggaagagaagaacatgatgctggacacccattcgctgtatgacatgacccgcggtatcttcctccctgctaaatcggaagaggaaattttcgaacatctggggcttgaatacctggaaccgttcgaacgtaacgca

SEQ ID NO: 4310 - protein, 529 aa, synthetic construct
  REGION 1..529: note = Variant of terminal deoxynucleotidyltransferase
MHHHHHHGGSGSHGIRTIDSDFGKKQQKKGDNHDSSATYEIKFHEFVLFILEEKMGATRRTFLTDLARKKGFRVENELTDEVTHIVAENLSRSEVLAWLKEHKMEKTKQFELLDISWLIESMKVGKPVDTKGKYQLAESVEVSANPDPTEGRVNELPPTMKTVSPYACQRRTTLNNRNQRFTDSLEILRENYELKGNDDTALEFRRAISVLKSLPFEVRSLKDTEGLPWISDEVKGIMEEIIEVGESREVQAVLNDEWYQSFHAFTRVFGVGVKTADKWYRMGLRTLEDVRSSKTLKLTPWQKVGLLYYEDLARGVTRAEADAIWLLVQDAVATVDPDAIVEIVGGFRRGKPQGHDVDLLISSPGAEKEQEDQLLQKVMNLWKKQGLLLCGRLEWSQWEDGGSPSGKADEGDAEASCFLILKLYDHLVRKSKRNMPTGSNMGESKPWKAIKVDLLRCPYGSFAFAMLQWTGSRMFRRDLRRYALEEKNMMLDTHSLYDMTRGIFLPAKSEEEIFEHLGLEYLEPFERNA

SEQ ID NO: 4311 - DNA, 1587 bp, synthetic construct
  misc_feature 1..1587: note = Variant of terminal deoxynucleotidyltransferase
  source 1..1587: mol_type = other DNA
atgcaccatcatcatcatcatggcggtagcggcagccacggcattcgtaccatcgattcggacttcgggaagaaacagcagaaaaaaggcgataaccacgatagttccgccacttatgaaatcaaatttcacgagtttgtgctgttcattctcgaagaaaaaatgggtgcgacgcgtcgtacttttctgacagatttagcccgcaagaaagggttccgcgtcgagaatgaactgaccgacgaagttacccacatcgtggcagaaaatctgtcacgctctgaagtattggcttggctgaaagaacacaagatggagaagaccaagcaattcgaactgctggatattagctggcttatcgaaagcatgaaagttggtaaaccggtggacaccaaggggaaataccagttggcggaatcggttgaggtgagtgcgaacccagatccgacagaaggtcgtgtaaacgagctgcctcctactatgaaaaccgtttctccgtatgcgtgtcaacgccgcaccaccctgaacaaccgtaatcaacgttttacggactcgctggagattcttcgtgaaaattacgagctgaaaggcaacgacgatactgcgctggaatttcgtcgtgctatctccgtgctgaaaagccttccgtttgaggtacgtagcctgaaagacacggaaggattgccctggatcagtgatgaagtcaaagggattatggaagaaatcatcgaagtcggggagtcgcgtgaagtgcaggccgtgctcaatgatgagtggtatcaaagcttccacgcatttacgcgtgtctttggagtgggggtgaagacagcagacaagtggtaccgtatgggtctgcgcaccctcgaggatgttcgttccagcaagaccctgaagttgaccccgtggcagaaagtaggtctgctgtattatgaagatcttgctcgcggcgttacgcgtgccgaagctgacgcgatttggctgctggttcaggatgcagtcgcaactttcgacccggatgcgatcgtggagattgtcggtggatttcgtcgtgggaaacctcagggtcacgacgttgatctgcttatcagttctccgggagctgagaaagagcaagaagaccaactcctgcagaaagtgatgaatctgtggaagaaacaagggttgttgctgtgtggtcgtctggaaaatagtcagtgggaagatgggaaatcgccttccggtaaggctgatgagggtgacgcggaggcgtcgtgctttctgatcctcaaactttatgatcatctggtgcgtaaaagtaaacgcaatatgccgactggttcgaacatgggcgagtccaaaccgtggaaagcaattaaagtagatctgctgcgttgcccctatggcagttttgcgtttgcgatgttgcagtggaccggaagccgcatgttccgtcgtgatctgcgctggtacgccctggaagagaagaacatgatgctggacaatcattcgctgtatgacatgacccgcggtatcttcctccctgctaaatcggaagaggaaattttcgaacatctggggcttgaatacctggaaccgttcgaacgtaacgca

SEQ ID NO: 4312 - protein, 529 aa, synthetic construct
  REGION 1..529: note = Variant of terminal deoxynucleotidyltransferase
MHHHHHHGGSGSHGIRTIDSDFGKKQQKKGDNHDSSATYEIKFHEFVLFILEEKMGATRRTFLTDLARKKGFRVENELTDEVTHIVAENLSRSEVLAWLKEHKMEKTKQFELLDISWLIESMKVGKPVDTKGKYQLAESVEVSANPDPTEGRVNELPPTMKTVSPYACQRRTTLNNRNQRFTDSLEILRENYELKGNDDTALEFRRAISVLKSLPFEVRSLKDTEGLPWISDEVKGIMEEIIEVGESREVQAVLNDEWYQSFHAFTRVFGVGVKTADKWYRMGLRTLEDVRSSKTLKLTPWQKVGLLYYEDLARGVTRAEADAIWLLVQDAVATFDPDAIVEIVGGFRRGKPQGHDVDLLISSPGAEKEQEDQLLQKVMNLWKKQGLLLCGRLENSQWEDGKSPSGKADEGDAEASCFLILKLYDHLVRKSKRNMPTGSNMGESKPWKAIKVDLLRCPYGSFAFAMLQWTGSRMFRRDLRWYALEEKNMMLDNHSLYDMTRGIFLPAKSEEEIFEHLGLEYLEPFERNA

SEQ ID NO: 4313 - DNA, 1587 bp, synthetic construct
  misc_feature 1..1587: note = Variant of terminal deoxynucleotidyltransferase
  source 1..1587: mol_type = other DNA
atgcaccatcatcatcatcatggcggtagcggcagccacggcattcgtaccatcgattcggacttcgggaagaaacagcagaaaaaaggcgataaccacgatagttccgccacttatgaaatcaaatttcacgagtttgtgctgttcattctcgaagaaaaaatgggtgcgacgcgtcgtacttttctgacagatttagcccgcaagaaagggttccgcgtcgagaatgaactgaccgacgaagttacccacatcgtggcagaaaatctgtcacgctctgaagtattggcttggctgaaagaacacaagatggagaagaccaagcaattcgaactgctggatattagctggcttatcgaaagcatgaaagttggtaaaccggtggacaccaaggggaaataccagttggcggaatcggttgaggtgagtgcgaacccagatccgacagaaggtcgtgtaaacgagctgcctcctactatgaaaaccgtttctccgtatgcgtgtcaacgccgcaccaccctgaacaaccgtaatcaacgttttacggactcgctggagattcttcgtgaaaattacgagctgaaaggcaacgacgatactgcgctggaatttcgtcgtgctatctccgtgctgaaaagccttccgtttgaggtacgtagcctgaaagacacggaaggattgccctggatcagtgatgaagtcaaagggattatggaagaaatcatcgaagtcggggagtcgcgtgaagtgcaggccgtgctcaatgatgagtggtatcaaagcttccacgcatttacgcgtgtctttggagtgggggtgaagacagcagacaagtggtaccgtatgggtctgcgcaccctcgaggatgttcgttccagcaagaccctgaagttgaccccgtggcagaaagtaggtctgctgtattatgaagatcttgctcgcggcgttacgcgtgccgaagctgacgcgatttggctgctggttcaggatgcagtcgcaactttcgacccggatgcgatcgtggagattgtcggtggatttcgtcgtgggaaacctcagggtcacgacgttgatctgcttatcagttctccgggagctgagaaagagcaagaagaccaactcctgcagaaagtgatgaatctgtggaagaaacaagggttgttgctgtgtggtcgtctggaatggagtcagtgggaagatgggggttcgccttccggtaaggctgatgagggtgacgcggaggcgtcgtgctttctgatcctcaaactttatgatcatctggtgcgtaaaagtaaacgcaatatgccgactggttcgaacatgggcgagtccaaaccgtggaaagcaattaaagtagatctgctgcgttgccccgtgggcagttttgcgtttgcgatgttgcagtggaccggaagccgcatgttccgtcgtgatctgcgctggtacgccctggaagagaagaacatgatgctggacaatcattcgctgtatgacatgacccgcggtatcttcctccctgctaaatcggaagaggaaattttcgaacatctggggcttgaatacctggaaccgttcgaacgtaacgca

SEQ ID NO: 4314 - protein, 529 aa, synthetic construct
  REGION 1..529: note = Variant of terminal deoxynucleotidyltransferase
MHHHHHHGGSGSHGIRTIDSDFGKKQQKKGDNHDSSATYEIKFHEFVLFILEEKMGATRRTFLTDLARKKGFRVENELTDEVTHIVAENLSRSEVLAWLKEHKMEKTKQFELLDISWLIESMKVGKPVDTKGKYQLAESVEVSANPDPTEGRVNELPPTMKTVSPYACQRRTTLNNRNQRFTDSLEILRENYELKGNDDTALEFRRAISVLKSLPFEVRSLKDTEGLPWISDEVKGIMEEIIEVGESREVQAVLNDEWYQSFHAFTRVFGVGVKTADKWYRMGLRTLEDVRSSKTLKLTPWQKVGLLYYEDLARGVTRAEADAIWLLVQDAVATFDPDAIVEIVGGFRRGKPQGHDVDLLISSPGAEKEQEDQLLQKVMNLWKKQGLLLCGRLEWSQWEDGGSPSGKADEGDAEASCFLILKLYDHLVRKSKRNMPTGSNMGESKPWKAIKVDLLRCPVGSFAFAMLQWTGSRMFRRDLRWYALEEKNMMLDNHSLYDMTRGIFLPAKSEEEIFEHLGLEYLEPFERNA

SEQ ID NO: 4315 - DNA, 1587 bp, synthetic construct
  misc_feature 1..1587: note = Variant of terminal deoxynucleotidyltransferase
  source 1..1587: mol_type = other DNA
atgcaccatcatcatcatcatggcggtagcggcagccacggcattcgtaccatcgattcggacttcgggaagaaacagcagaaaaaaggcgataaccacgatagttccgccacttatgaaatcaaatttcacgagtttgtgctgttcattctcgaagaaaaaatgggtgcgacgcgtcgtacttttctgacagatttagcccgcaagaaagggttccgcgtcgagaatgaactgaccgacgaagttacccacatcgtggcagaaaatctgtcacgctctgaagtattggcttggctgaaagaacacaagatggagaagaccaagcaattcgaactgctggatattagctggcttatcgaaagcatgaaagttggtaaaccggtggacaccaaggggaaataccagttggcggaatcggttgaggtgagtgcgaacccagatccgacagaaggtcgtgtaaacgagctgcctcctactatgaaaaccgtttctccgtatgcgtgtcaacgccgcaccaccctgaacaaccgtaatcaacgttttacggactcgctggagattcttcgtgaaaattacgagctgaaaggcaacgacgatactgcgctggaatttcgtcgtgctatctccgtgctgaaaagccttccgtttgaggtacgtagcctgaaagacacggaaggattgccctggatcagtgatgaagtcaaagggattatggaagaaatcatcgaagtcggggagtcgcgtgaagtgcaggccgtgctcaatgatgagtggtatcaaagcttccacgcatttacgcgtgtctttggagtgggggtgaagacagcagacaagtggtaccgtatgggtctgcgcaccctcgaggatgttcgttccagcaagaccctgaagttgaccccgtggcagaaagtaggtctgctgtattatgaagatcttgctcgcggcgttacgcgtgccgaagctgacgcgatttggctgctggttcaggatgcagtcgcaactttcgacccggatgcgatcgtggagattgtcggtggatttcgtcgtgggaaacctcagggtcacgacgttgatctgcttatcagttctccgggagctgagaaagagcaagaagaccaactcctgcagaaagtgatgaatctgtggaagaaacaagggttgttgctgtgtggtcgtctggaatggagtcagtgggaagatgggggttcgccttccggtaaggctgatgagggtgacgcggaggcgtcgtgctttctgatcctcaaactttatgatcatctggtgcgtaaaagtaaacgcaatatgccgactggttcgaacatgggcgagtccaaaccgtggaaagcaattaaagtagatctgctgcgttgcccctatggcagttttgcgtttgcgatgttgcagtggaccggaagccgcatgttccgtcgtgatctgcgctggtacgccctggaagagaagaacatgatgctggacacgcattcgctgtatgacatgacccgcggtatcttcctccctgctaaatcggaagaggaaattttcgaacatctggggcttgaatacctggaaccgttcgaacgtaacgca

SEQ ID NO: 4316 - protein, 529 aa, synthetic construct
  REGION 1..529: note = Variant of terminal deoxynucleotidyltransferase
MHHHHHHGGSGSHGIRTIDSDFGKKQQKKGDNHDSSATYEIKFHEFVLFILEEKMGATRRTFLTDLARKKGFRVENELTDEVTHIVAENLSRSEVLAWLKEHKMEKTKQFELLDISWLIESMKVGKPVDTKGKYQLAESVEVSANPDPTEGRVNELPPTMKTVSPYACQRRTTLNNRNQRFTDSLEILRENYELKGNDDTALEFRRAISVLKSLPFEVRSLKDTEGLPWISDEVKGIMEEIIEVGESREVQAVLNDEWYQSFHAFTRVFGVGVKTADKWYRMGLRTLEDVRSSKTLKLTPWQKVGLLYYEDLARGVTRAEADAIWLLVQDAVATFDPDAIVEIVGGFRRGKPQGHDVDLLISSPGAEKEQEDQLLQKVMNLWKKQGLLLCGRLEWSQWEDGGSPSGKADEGDAEASCFLILKLYDHLVRKSKRNMPTGSNMGESKPWKAIKVDLLRCPYGSFAFAMLQWTGSRMFRRDLRWYALEEKNMMLDTHSLYDMTRGIFLPAKSEEEIFEHLGLEYLEPFERNA

SEQ ID NO: 4317 - DNA, 1587 bp, synthetic construct
  misc_feature 1..1587: note = Variant of terminal deoxynucleotidyltransferase
  source 1..1587: mol_type = other DNA
atgcaccatcatcatcatcatggcggtagcggcagccacggcattcgtaccatcgattcggacttcgggaagaaacagcagaaaaaaggcgataaccacgatagttccgccacttatgaaatcaaatttcacgagtttgtgctgttcattctcgaagaaaaaatgggtgcgacgcgtcgtacttttctgacagatttagcccgcaagaaagggttccgcgtcgagaatgaactgaccgacgaagttacccacatcgtggcagaaaatctgtcacgctctgaagtattggcttggctgaaagaacacaagatggagaagaccaagcaattcgaactgctggatattagctggcttatcgaaagcatgaaagttggtaaaccggtggacaccaaggggaaataccagttggcggaatcggttgaggtgagtgcgaacccagatccgacagaaggtcgtgtaaacgagctgcctcctactatgaaaaccgtttctccgtatgcgtgtcaacgccgcaccaccctgaacaaccgtaatcaacgttttacggactcgctggagattcttcgtgaaaattacgagctgaaaggcaacgacgatactgcgctggaatttcgtcgtgctatctccgtgctgaaaagccttccgtttgaggtacgtagcctgaaagacacggaaggattgccctggatcagtgatgaagtcaaagggattatggaagaaatcatcgaagtcggggagtcgcgtgaagtgcaggccgtgctcaatgatgagtggtatcaaagcttccacgcatttacgcgtgtctttggagtgggggtgaagacagcagacaagtggtaccgtatgggtctgcgcaccctcgaggatgttcgttccagcaagaccctgaagttgaccccgtggcagaaagtaggtctgctgtattatgaagatcttgctcgcggcgttacgcgtgccgaagctgacgcgatttggctgctggttcaggatgcagtcgcaactttcgacccggatgcgatcgtggagattgtcggtggatttcgtcgtgggaaacctcagggtcacgacgttgatctgcttatcagttctccgggagctgagaaagagcaagaagaccaactcctgcagaaagtgatgaatctgtggaagaaacaagggttgttgctgtgtggtcgtctggaatggagtcagtgggaagatgggggttcgccttccggtaaggctgatgagggtgacgcggaggcgtcgtgctttctgatcctcaaactttatgatcatctggtgcgtaaaagtaaacgcaatatgccgactggttcgaacatgggcgagtccaaaccgtggaaagcaattaaagtagatctgctgcgttgcccctatggcagttttgcgtttgcgatgttgcagtggaccggaagccgcatgttccgtcgtgatctgcgctggtacgccctggaagagaagaacatgatgctggacaatcattcgctgtatgaccctacccgcggtatcttcctccctgctaaatcggaagaggaaattttcgaacatctggggcttgaatacctggaaccgttcgaacgtaacgca

SEQ ID NO: 4318 - protein, 529 aa, synthetic construct
  REGION 1..529: note = Variant of terminal deoxynucleotidyltransferase
MHHHHHHGGSGSHGIRTIDSDFGKKQQKKGDNHDSSATYEIKFHEFVLFILEEKMGATRRTFLTDLARKKGFRVENELTDEVTHIVAENLSRSEVLAWLKEHKMEKTKQFELLDISWLIESMKVGKPVDTKGKYQLAESVEVSANPDPTEGRVNELPPTMKTVSPYACQRRTTLNNRNQRFTDSLEILRENYELKGNDDTALEFRRAISVLKSLPFEVRSLKDTEGLPWISDEVKGIMEEIIEVGESREVQAVLNDEWYQSFHAFTRVFGVGVKTADKWYRMGLRTLEDVRSSKTLKLTPWQKVGLLYYEDLARGVTRAEADAIWLLVQDAVATFDPDAIVEIVGGFRRGKPQGHDVDLLISSPGAEKEQEDQLLQKVMNLWKKQGLLLCGRLEWSQWEDGGSPSGKADEGDAEASCFLILKLYDHLVRKSKRNMPTGSNMGESKPWKAIKVDLLRCPYGSFAFAMLQWTGSRMFRRDLRWYALEEKNMMLDNHSLYDPTRGIFLPAKSEEEIFEHLGLEYLEPFERNA

SEQ ID NO: 4319 - DNA, 1587 bp, synthetic construct
  misc_feature 1..1587: note = Variant of terminal deoxynucleotidyltransferase
  source 1..1587: mol_type = other DNA
atgcaccatcatcatcatcatggcggtagcggcagccacggcattcgtaccatcgattcggacttcgggaagaaacagcagaaaaaaggcgataaccacgatagttccgccacttatgaaatcaaatttcacgagtttgtgctgttcattctcgaagaaaaaatgggtgcgacgcgtcgtacttttctgacagatttagcccgcaagaaagggttccgcgtcgagaatgaactgaccgacgaagttacccacatcgtggcagaaaatctgtcacgctctgaagtattggcttggctgaaagaacacaagatggagaagaccaagcaattcgaactgctggatattagctggcttatcgaaagcatgaaagttggtaaaccggtggacaccaaggggaaataccagttggcggaatcggttgaggtgagtgcgaacccagatccgacagaaggtcgtgtaaacgagctgcctcctactatgaaaaccgtttctccgtatgcgtgtcaacgccgcaccaccctgaacaaccgtaatcaacgttttacggactcgctggagattcttcgtgaaaattacgagctgaaaggcaacgacgatactgcgctggaatttcgtcgtgctatctccgtgctgaaaagccttccgtttgaggtacgtagcctgaaagacacggaaggattgccctggatcagtgatgaagtcaaagggattatggaagaaatcatcgaagtcggggagtcgcgtgaagtgcaggccgtgctcaatgatgagtggtatcaaagcttccacgcatttacgcgtgtctttggagtgggggtgaagacagcagacaagtggtaccgtatgggtctgcgcaccctcgaggatgttcgttccagcaagaccctgaagttgaccccgtggcagaaagtaggtctgctgtattatgaagatcttgctcgcggcgttacgcgtgccgaagctgacgcgatttggctgctggttcaggatgcagtcgcaactttcgacccggatgcgatcgtggagattgtcggtggatttcgtcgtgggaaacctcagggtcacgacgttgatctgcttatcagttctccgggagctgagaaagagcaagaagaccaactcctgcagaaagtgatgaatctgtggaagaaacaagggttgttgctgtgtggtcgtctggaatggagtcagtgggaatgggggggttcgccttccggtaaggctgatgagggtgacgcggaggcgtcgtgctttctgatcctcaaactttatgatcatctggtgcgtaaaagtaaacgcaatatgccgactggttcgaacatgggcgagtccaaaccgtggaaagcaattaaagtagatctgctgcgttgcccctacggcagttttgcgtttgcgatgttgcagtggaccggaagccgcatgttccgtcgtgatctgcgctggtacgccctggaagagaagaacatgatgctggacaatcattcgctgtatgacatgacccgcggtatcttcctccctgctaaatcggaagaggaaattttcgaacatctggggcttgaatacctggaaccgttcgaacgtaacgca

SEQ ID NO: 4320 - protein, 529 aa, synthetic construct
  REGION 1..529: note = Variant of terminal deoxynucleotidyltransferase
MHHHHHHGGSGSHGIRTIDSDFGKKQQKKGDNHDSSATYEIKFHEFVLFILEEKMGATRRTFLTDLARKKGFRVENELTDEVTHIVAENLSRSEVLAWLKEHKMEKTKQFELLDISWLIESMKVGKPVDTKGKYQLAESVEVSANPDPTEGRVNELPPTMKTVSPYACQRRTTLNNRNQRFTDSLEILRENYELKGNDDTALEFRRAISVLKSLPFEVRSLKDTEGLPWISDEVKGIMEEIIEVGESREVQAVLNDEWYQSFHAFTRVFGVGVKTADKWYRMGLRTLEDVRSSKTLKLTPWQKVGLLYYEDLARGVTRAEADAIWLLVQDAVATFDPDAIVEIVGGFRRGKPQGHDVDLLISSPGAEKEQEDQLLQKVMNLWKKQGLLLCGRLEWSQWEWGGSPSGKADEGDAEASCFLILKLYDHLVRKSKRNMPTGSNMGESKPWKAIKVDLLRCPYGSFAFAMLQWTGSRMFRRDLRWYALEEKNMMLDNHSLYDMTRGIFLPAKSEEEIFEHLGLEYLEPFERNA

SEQ ID NO: 4321 - DNA, 1587 bp, synthetic construct
  misc_feature 1..1587: note = Variant of terminal deoxynucleotidyltransferase
  source 1..1587: mol_type = other DNA
atgcaccatcatcatcatcatggcggtagcggcagccacggcattcgtaccatcgattcggacttcgggaagaaacagcagaaaaaaggcgataaccacgatagttccgccacttatgaaatcaaatttcacgagtttgtgctgttcattctcgaagaaaaaatgggtgcgacgcgtcgtacttttctgacagatttagcccgcaagaaagggttccgcgtcgagaatgaactgaccgacgaagttacccacatcgtggcagaaaatctgtcacgctctgaagtattggcttggctgaaagaacacaagatggagaagaccaagcaattcgaactgctggatattagctggcttatcgaaagcatgaaagttggtaaaccggtggacaccaaggggaaataccagttggcggaatcggttgaggtgagtgcgaacccagatccgacagaaggtcgtgtaaacgagctgcctcctactatgaaaaccgtttctccgtatgcgtgtcaacgccgcaccaccctgaacaaccgtaatcaacgttttacggactcgctggagattcttcgtgaaaattacgagctgaaaggcaacgacgatactgcgctggaatttcgtcgtgctatctccgtgctgaaaagccttccgtttgaggtacgtagcctgaaagacacggaaggattgccctggatcagtgatgaagtcaaagggattatggaagaaatcatcgaagtcggggagtcgcgtgaagtgcaggccgtgctcaatgatgagtggtatcaaagcttccacgcatttacgcgtgtctttggagtgggggtgaagacagcagacaagtggtaccgtatgggtctgcgcaccctcgaggatgttcgttccagcaagaccctgaagttgaccccgtggcagaaagtaggtctgctgtattatgaagatcttgctcgcggcgttacgcgtgccgaagctgacgcgatttggctgctggttcaggatgcagtcgcaactgtcgacccggatgcgatcgtggagattgtcggtggatttcgtcgtgggaaacctcagggtcacgacgttgatctgcttatcagttctccgggagctgagaaagagcaagaagaccaactcctgcagaaagtgatgaatctgtggaagaaacaagggttgttgctgtgtggtcgtctggaatggagtcagtgggaagatgggaaatcgccttccggtaaggctgatgagggtgacgcggaggcgtcgtgctttctgatcctcaaactttatgatcatctggtgcgtaaaagtaaacgcaatatgccgactggttcgaacatgggcgagtccaaaccgtggaaagcaattaaagtagatctgctgcgttgcccctatggcagttttgcgtttgcgatgttgcagtggaccggaagccgcatgttccgtcgtgatctgcgccgctacgcccgtgaagagaagaacatgatgctggacaatcattcgctgtatgacatgacccgcggtatcttcctccctgctaaatcggaagaggaaattttcgaacatctggggcttgaatacctggaaccgttcgaacgtaacgca

SEQ ID NO: 4322 - protein, 529 aa, synthetic construct
  REGION 1..529: note = Variant of terminal deoxynucleotidyltransferase
MHHHHHHGGSGSHGIRTIDSDFGKKQQKKGDNHDSSATYEIKFHEFVLFILEEKMGATRRTFLTDLARKKGFRVENELTDEVTHIVAENLSRSEVLAWLKEHKMEKTKQFELLDISWLIESMKVGKPVDTKGKYQLAESVEVSANPDPTEGRVNELPPTMKTVSPYACQRRTTLNNRNQRFTDSLEILRENYELKGNDDTALEFRRAISVLKSLPFEVRSLKDTEGLPWISDEVKGIMEEIIEVGESREVQAVLNDEWYQSFHAFTRVFGVGVKTADKWYRMGLRTLEDVRSSKTLKLTPWQKVGLLYYEDLARGVTRAEADAIWLLVQDAVATVDPDAIVEIVGGFRRGKPQGHDVDLLISSPGAEKEQEDQLLQKVMNLWKKQGLLLCGRLEWSQWEDGKSPSGKADEGDAEASCFLILKLYDHLVRKSKRNMPTGSNMGESKPWKAIKVDLLRCPYGSFAFAMLQWTGSRMFRRDLRRYAREEKNMMLDNHSLYDMTRGIFLPAKSEEEIFEHLGLEYLEPFERNA

SEQ ID NO: 4323 - DNA, 1587 bp, synthetic construct
  misc_feature 1..1587: note = Variant of terminal deoxynucleotidyltransferase
  source 1..1587: mol_type = other DNA
atgcaccatcatcatcatcatggcggtagcggcagccacggcattcgtaccatcgattcggacttcgggaagaaacagcagaaaaaaggcgataaccacgatagttccgccacttatgaaatcaaatttcacgagtttgtgctgttcattctcgaagaaaaaatgggtgcgacgcgtcgtacttttctgacagatttagcccgcaagaaagggttccgcgtcgagaatgaactgaccgacgaagttacccacatcgtggcagaaaatctgtcacgctctgaagtattggcttggctgaaagaacacaagatggagaagaccaagcaattcgaactgctggatattagctggcttatcgaaagcatgaaagttggtaaaccggtggacaccaaggggaaataccagttggcggaatcggttgaggtgagtgcgaacccagatccgacagaaggtcgtgtaaacgagctgcctcctactatgaaaaccgtttctccgtatgcgtgtcaacgccgcaccaccctgaacaaccgtaatcaacgttttacggactcgctggagattcttcgtgaaaattacgagctgaaaggcaacgacgatactgcgctggaatttcgtcgtgctatctccgtgctgaaaagccttccgtttgaggtacgtagcctgaaagacacggaaggattgccctggatcagtgatgaagtcaaagggattatggaagaaatcatcgaagtcggggagtcgcgtgaagtgcaggccgtgctcaatgatgagtggtatcaaagcttccacgcatttacgcgtgtctttggagtgggggtgaagacagcagacaagtggtaccgtatgggtctgcgcaccctcgaggatgttcgttccagcaagaccctgaagttgaccccgtggcagaaagtaggtctgctgtattatgaagatcttgctcgcggcgttacgcgtgccgaagctgacgcgatttggctgctggttcaggatgcagtcgcaactttcgacccggatgcgatcgtggagattgtcggtggatttcgtcgtgggaaacctcagggtcacgacgttgatctgcttatcagttctccgggagctgagaaagagcaagaagaccaactcctgcagaaagtgatgaatctgtggaagaaacaagggttgttgctgtgtggtcgtctggaatggagtcagtgggaagatgggggttcgccttccggtaaggctgatgagggtgacgcggaggcgtcgtgctttctgatcctcaaactttatgatcatctggtgcgtaaaagtaaacgcaatatgccgactggttcgaacatgggcgagtccaaaccgtggaaagcaattaaagtagatctgctgcgttgcccctatggcagttttgcgtttgcgatgttgcagtggaccggaagccgcatgttccgtcgtgatctgcgcgattacgccctggaagagaagaacatgatgctggacaatcattcgctgtatgacatgacccgcggtatcttcctccctgctaaatcggaagaggaaattttcgaacatctggggcttgaatacctggaaccgttcgaacgtaacgca

SEQ ID NO: 4324 - protein, 529 aa, synthetic construct
  REGION 1..529: note = Variant of terminal deoxynucleotidyltransferase
MHHHHHHGGSGSHGIRTIDSDFGKKQQKKGDNHDSSATYEIKFHEFVLFILEEKMGATRRTFLTDLARKKGFRVENELTDEVTHIVAENLSRSEVLAWLKEHKMEKTKQFELLDISWLIESMKVGKPVDTKGKYQLAESVEVSANPDPTEGRVNELPPTMKTVSPYACQRRTTLNNRNQRFTDSLEILRENYELKGNDDTALEFRRAISVLKSLPFEVRSLKDTEGLPWISDEVKGIMEEIIEVGESREVQAVLNDEWYQSFHAFTRVFGVGVKTADKWYRMGLRTLEDVRSSKTLKLTPWQKVGLLYYEDLARGVTRAEADAIWLLVQDAVATFDPDAIVEIVGGFRRGKPQGHDVDLLISSPGAEKEQEDQLLQKVMNLWKKQGLLLCGRLEWSQWEDGGSPSGKADEGDAEASCFLILKLYDHLVRKSKRNMPTGSNMGESKPWKAIKVDLLRCPYGSFAFAMLQWTGSRMFRRDLRDYALEEKNMMLDNHSLYDMTRGIFLPAKSEEEIFEHLGLEYLEPFERNA

SEQ ID NO: 4325 - DNA, 1587 bp, synthetic construct
  misc_feature 1..1587: note = Variant of terminal deoxynucleotidyltransferase
  source 1..1587: mol_type = other DNA
atgcaccatcatcatcatcatggcggtagcggcagccacggcattcgtaccatcgattcggacttcgggaagaaacagcagaaaaaaggcgataaccacgatagttccgccacttatgaaatcaaatttcacgagtttgtgctgttcattctcgaagaaaaaatgggtgcgacgcgtcgtacttttctgacagatttagcccgcaagaaagggttccgcgtcgagaatgaactgaccgacgaagttacccacatcgtggcagaaaatctgtcacgctctgaagtattggcttggctgaaagaacacaagatggagaagaccaagcaattcgaactgctggatattagctggcttatcgaaagcatgaaagttggtaaaccggtggacaccaaggggaaataccagttggcggaatcggttgaggtgagtgcgaacccagatccgacagaaggtcgtgtaaacgagctgcctcctactatgaaaaccgtttctccgtatgcgtgtcaacgccgcaccaccctgaacaaccgtaatcaacgttttacggactcgctggagattcttcgtgaaaattacgagctgaaaggcaacgacgatactgcgctggaatttcgtcgtgctatctccgtgctgaaaagccttccgtttgaggtacgtagcctgaaagacacggaaggattgccctggatcagtgatgaagtcaaagggattatggaagaaatcatcgaagtcggggagtcgcgtgaagtgcaggccgtgctcaatgatgagtggtatcaaagcttccacgcatttacgcgtgtctttggagtgggggtgaagacagcagacaagtggtaccgtatgggtctgcgcaccctcgaggatgttcgttccagcaagaccctgaagttgaccccgtggcagaaagtaggtctgctgtattatgaagatcttgctcgcggcgttacgcgtgccgaagctgacgcgatttggctgctggttcaggatgcagtcgcaactttcgacccggatgcgatcgtggagattgtcggtggatttcgtcgtgggaaacctcagggtcacgacgttgatctgcttatcagttctccgggagctgagaaagagcaagaagaccaactcctgcagaaagtgatgaatctgtggaagaaacaagggttgttgctgtgtggtcgtctggaatggagtcagtgggaagatgggaaatcgccttccggtaaggctgatgagggtgacgcggaggcgtcgtgctttctgatcctcaaactttatgatcatctggtgcgtaaaagtaaacgcaatatgccgactggttcgaacatgggcgagtccaaaccgtggaaagcaattaaagtagatctgctgcgttgcccctatggcagttttgcgtttgcgatgttgcagtggaccggaagccgcatgttccgtcgtgatctgcgccgctacgcccgtgaagagaagaacatgatgctggacaatcattcgctgtatgacatgacccgcggtatcttcctccctgctaaatcggaagaggagattttcgaacatctggggcttgaatacctggaaccgttcgaacgtaacgca

SEQ ID NO: 4326 - protein, 529 aa, synthetic construct
  REGION 1..529: note = Variant of terminal deoxynucleotidyltransferase
MHHHHHHGGSGSHGIRTIDSDFGKKQQKKGDNHDSSATYEIKFHEFVLFILEEKMGATRRTFLTDLARKKGFRVENELTDEVTHIVAENLSRSEVLAWLKEHKMEKTKQFELLDISWLIESMKVGKPVDTKGKYQLAESVEVSANPDPTEGRVNELPPTMKTVSPYACQRRTTLNNRNQRFTDSLEILRENYELKGNDDTALEFRRAISVLKSLPFEVRSLKDTEGLPWISDEVKGIMEEIIEVGESREVQAVLNDEWYQSFHAFTRVFGVGVKTADKWYRMGLRTLEDVRSSKTLKLTPWQKVGLLYYEDLARGVTRAEADAIWLLVQDAVATFDPDAIVEIVGGFRRGKPQGHDVDLLISSPGAEKEQEDQLLQKVMNLWKKQGLLLCGRLEWSQWEDGKSPSGKADEGDAEASCFLILKLYDHLVRKSKRNMPTGSNMGESKPWKAIKVDLLRCPYGSFAFAMLQWTGSRMFRRDLRRYAREEKNMMLDNHSLYDMTRGIFLPAKSEEEIFEHLGLEYLEPFERNA

SEQ ID NO: 4327 - DNA, 1587 bp, synthetic construct
  misc_feature 1..1587: note = Variant of terminal deoxynucleotidyltransferase
  source 1..1587: mol_type = other DNA
atgcaccatcatcatcatcatggcggtagcggcagccacggcattcgtaccatcgattcggacttcgggaagaaacagcagaaaaaaggcgataaccacgatagttccgccacttatgaaatcaaatttcacgagtttgtgctgttcattctcgaagaaaaaatgggtgcgacgcgtcgtacttttctgacagatttagcccgcaagaaagggttccgcgtcgagaatgaactgaccgacgaagttacccacatcgtggcagaaaatctgtcacgctctgaagtattggcttggctgaaagaacacaagatggagaagaccaagcaattcgaactgctggatattagctggcttatcgaaagcatgaaagttggtaaaccggtggacaccaaggggaaataccagttggcggaatcggttgaggtgagtgcgaacccagatccgacagaaggtcgtgtaaacgagctgcctcctactatgaaaaccgtttctccgtatgcgtgtcaacgccgcaccaccctgaacaaccgtaatcaacgttttacggactcgctggagattcttcgtgaaaattacgagctgaaaggcaacgacgatactgcgctggaatttcgtcgtgctatctccgtgctgaaaagccttccgtttgaggtacgtagcctgaaagacacggaaggattgccctggatcagtgatgaagtcaaagggattatggaagaaatcatcgaagtcggggagtcgcgtgaagtgcaggccgtgctcaatgatgagtggtatcaaagcttccacgcatttacgcgtgtctttggagtgggggtgaagacagcagacaagtggtaccgtatgggtctgcgcaccctcgaggatgttcgttccagcaagaccctgaagttgaccccgtggcagaaagtaggtctgctgtattatgaagatcttgctcgcggcgttacgcgtgccgaagctgacgcgatttggctgctggttcaggatgcagtcgcaactttcgacccggatgcgatcgtggagattgtcggtggatttcgtcgtgggaaacctcagggtcacgacgttgatctgcttatcagttctccgggagctgagaaagagcaagaagaccaactcctgcagaaagtgatgaatctgtggaagaaacaagggttgttgctgtgtggtcgtctggaaactagtcagtgggaagatgggggttcgccttccggtaaggctgatgagggtgacgcggaggcgtcgtgctttctgatcctcaaactttatgatcatctggtgcgtaaaagtaaacgcaatatgccgactggttcgaacatgggcgagtccaaaccgtggaaagcaattaaagtagatctgctgcgttgcccctatggcagttttgcgtttgcgatgttgcagtggaccggaagccgcatgttccgtcgtgatctgcgctggtacgccctggaagagaagaacatgatgctggacaatcattcgctgtatgacatgacccgcggtatcttcctccctgctaaatcggaagaggaaattttcgaacatctggggcttgaatacctggaaccgttcgaacgtaacgca

SEQ ID NO: 4328 - protein, 529 aa, synthetic construct
  REGION 1..529: note = Variant of terminal deoxynucleotidyltransferase
MHHHHHHGGSGSHGIRTIDSDFGKKQQKKGDNHDSSATYEIKFHEFVLFILEEKMGATRRTFLTDLARKKGFRVENELTDEVTHIVAENLSRSEVLAWLKEHKMEKTKQFELLDISWLIESMKVGKPVDTKGKYQLAESVEVSANPDPTEGRVNELPPTMKTVSPYACQRRTTLNNRNQRFTDSLEILRENYELKGNDDTALEFRRAISVLKSLPFEVRSLKDTEGLPWISDEVKGIMEEIIEVGESREVQAVLNDEWYQSFHAFTRVFGVGVKTADKWYRMGLRTLEDVRSSKTLKLTPWQKVGLLYYEDLARGVTRAEADAIWLLVQDAVATFDPDAIVEIVGGFRRGKPQGHDVDLLISSPGAEKEQEDQLLQKVMNLWKKQGLLLCGRLETSQWEDGGSPSGKADEGDAEASCFLILKLYDHLVRKSKRNMPTGSNMGESKPWKAIKVDLLRCPYGSFAFAMLQWTGSRMFRRDLRWYALEEKNMMLDNHSLYDMTRGIFLPAKSEEEIFEHLGLEYLEPFERNA

SEQ ID NO: 4329 - DNA, 1587 bp, synthetic construct
  misc_feature 1..1587: note = Variant of terminal deoxynucleotidyltransferase
  source 1..1587: mol_type = other DNA
atgcaccatcatcatcatcatggcggtagcggcagccacggcattcgtaccatcgattcggacttcgggaagaaacagcagaaaaaaggcgataaccacgatagttccgccacttatgaaatcaaatttcacgagtttgtgctgttcattctcgaagaaaaaatgggtgcgacgcgtcgtacttttctgacagatttagcccgcaagaaagggttccgcgtcgagaatgaactgaccgacgaagttacccacatcgtggcagaaaatctgtcacgctctgaagtattggcttggctgaaagaacacaagatggagaagaccaagcaattcgaactgctggatattagctggcttatcgaaagcatgaaagttggtaaaccggtggacaccaaggggaaataccagttggcggaatcggttgaggtgagtgcgaacccagatccgacagaaggtcgtgtaaacgagctgcctcctactatgaaaaccgtttctccgtatgcgtgtcaacgccgcaccaccctgaacaaccgtaatcaacgttttacggactcgctggagattcttcgtgaaaattacgagctgaaaggcaacgacgatactgcgctggaatttcgtcgtgctatctccgtgctgaaaagccttccgtttgaggtacgtagcctgaaagacacggaaggattgccctggatcagtgatgaagtcaaagggattatggaagaaatcatcgaagtcggggagtcgcgtgaagtgcaggccgtgctcaatgatgagtggtatcaaagcttccacgcatttacgcgtgtctttggagtgggggtgaagacagcagacaagtggtaccgtatgggtctgcgcaccctcgaggatgttcgttccagcaagaccctgaagttgaccccgtggcagaaagtaggtctgctgtattatgaagatcttgctcgcggcgttacgcgtgccgaagctgacgcgatttggctgctggttcaggatgcagtcgcaactttcgacccggatgcgatcgtggagattgtcggtggatttcgtcgtgggaaacctcagggtcacgacgttgatctgcttatcagttctccgggagctgagaaagagcaagaagaccaactcctgcagaaagtgatgaatctgtggaagaaacaagggttgttgctgtgtggtcgtctggaatggagtcagtgggaagacgggggttcgccttccggtaaggctgatgagggtgacgcggaggcgtcgtgctttctgatcctcaaactttatgatcatctggtgcgtaaaagtaaacgcaatatgccgactggttcgaacatgggcgagtccaaaccgtggaaagcaattaaagtagatctgctgcgttgccccgtcggcagttttgcgtttgcgatgttgcagtggaccggaagccgcatgttccgtcgtgatctgcgctggtacgccctggaagagaagaacatgatgctggacaatcattcgctgtatgacatgactcctggtatctttctccctgctaaatcggaagaggaaattttcgaacatctggggcttgaatacctggaaccgttcgaacgtaacgca

SEQ ID NO: 4330 - protein, 529 aa, synthetic construct
  REGION 1..529: note = Variant of terminal deoxynucleotidyltransferase
MHHHHHHGGSGSHGIRTIDSDFGKKQQKKGDNHDSSATYEIKFHEFVLFILEEKMGATRRTFLTDLARKKGFRVENELTDEVTHIVAENLSRSEVLAWLKEHKMEKTKQFELLDISWLIESMKVGKPVDTKGKYQLAESVEVSANPDPTEGRVNELPPTMKTVSPYACQRRTTLNNRNQRFTDSLEILRENYELKGNDDTALEFRRAISVLKSLPFEVRSLKDTEGLPWISDEVKGIMEEIIEVGESREVQAVLNDEWYQSFHAFTRVFGVGVKTADKWYRMGLRTLEDVRSSKTLKLTPWQKVGLLYYEDLARGVTRAEADAIWLLVQDAVATFDPDAIVEIVGGFRRGKPQGHDVDLLISSPGAEKEQEDQLLQKVMNLWKKQGLLLCGRLEWSQWEDGGSPSGKADEGDAEASCFLILKLYDHLVRKSKRNMPTGSNMGESKPWKAIKVDLLRCPVGSFAFAMLQWTGSRMFRRDLRWYALEEKNMMLDNHSLYDMTPGIFLPAKSEEEIFEHLGLEYLEPFERNA

SEQ ID NO: 4331 - DNA, 1587 bp, synthetic construct
  misc_feature 1..1587: note = Variant of terminal deoxynucleotidyltransferase
  source 1..1587: mol_type = other DNA
atgcaccatcatcatcatcatggcggtagcggcagccacggcattcgtaccatcgattcggacttcgggaagaaacagcagaaaaaaggcgataaccacgatagttccgccacttatgaaatcaaatttcacgagtttgtgctgttcattctcgaagaaaaaatgggtgcgacgcgtcgtacttttctgacagatttagcccgcaagaaagggttccgcgtcgagaatgaactgaccgacgaagttacccacatcgtggcagaaaatctgtcacgctctgaagtattggcttggctgaaagaacacaagatggagaagaccaagcaattcgaactgctggatattagctggcttatcgaaagcatgaaagttggtaaaccggtggacaccaaggggaaataccagttggcggaatcggttgaggtgagtgcgaacccagatccgacagaaggtcgtgtaaacgagctgcctcctactatgaaaaccgtttctccgtatgcgtgtcaacgccgcaccaccctgaacaaccgtaatcaacgttttacggactcgctggagattcttcgtgaaaattacgagctgaaaggcaacgacgatactgcgctggaatttcgtcgtgctatctccgtgctgaaaagccttccgtttgaggtacgtagcctgaaagacacggaaggattgccctggatcagtgatgaagtcaaagggattatggaagaaatcatcgaagtcggggagtcgcgtgaagtgcaggccgtgctcaatgatgagtggtatcaaagcttccacgcatttacgcgtgtctttggagtgggggtgaagacagcagacaagtggtaccgtatgggtctgcgcaccctcgaggatgttcgttccagcaagaccctgaagttgaccccgtggcagaaagtaggtctgctgtattatgaagatcttgctcgcggcgttacgcgtgccgaagctgacgcgatttggctgctggttcaggatgcagtcgcaactttcgacccggatgcgatcgtggagattgtcggtggatttcgtcgtgggaaacctcagggtcacgacgttgatctgcttatcagttctccgggagctgagaaagagcaagaagaccaactcctgcagaaagtgatgaatctgtggaagaaacaagggttgttgctgtgtggtcgtctggaaaatagtcagtgggaagatgggggttcgccttccggtaaggctgatgagggtgacgcggaggcgtcgtgctttctgatcctcaaactttatgatcatctggtgcgtaaaagtaaacgcaatatgccgactggttcgaacatgggcgagtccaaaccgtggaaagcaattaaagtagatctgctgcgttgcccctatggcagttttgcgtttgcgatgttgcagtggaccggaagccgcatgttccgtcgtgatctgcgccgctacgccctggaagagaagaacatgatgctggacaatcattcgctgtatgacatgacccgcggtatcttcctccctgctaaatcggaagagcgcattttcgaacatctggggcttgaatacctggaaccgttcgaacgtaacgca

SEQ ID NO: 4332 - protein, 529 aa, synthetic construct
  REGION 1..529: note = Variant of terminal deoxynucleotidyltransferase
MHHHHHHGGSGSHGIRTIDSDFGKKQQKKGDNHDSSATYEIKFHEFVLFILEEKMGATRRTFLTDLARKKGFRVENELTDEVTHIVAENLSRSEVLAWLKEHKMEKTKQFELLDISWLIESMKVGKPVDTKGKYQLAESVEVSANPDPTEGRVNELPPTMKTVSPYACQRRTTLNNRNQRFTDSLEILRENYELKGNDDTALEFRRAISVLKSLPFEVRSLKDTEGLPWISDEVKGIMEEIIEVGESREVQAVLNDEWYQSFHAFTRVFGVGVKTADKWYRMGLRTLEDVRSSKTLKLTPWQKVGLLYYEDLARGVTRAEADAIWLLVQDAVATFDPDAIVEIVGGFRRGKPQGHDVDLLISSPGAEKEQEDQLLQKVMNLWKKQGLLLCGRLENSQWEDGGSPSGKADEGDAEASCFLILKLYDHLVRKSKRNMPTGSNMGESKPWKAIKVDLLRCPYGSFAFAMLQWTGSRMFRRDLRRYALEEKNMMLDNHSLYDMTRGIFLPAKSEERIFEHLGLEYLEPFERNA

SEQ ID NO: 4333 - DNA, 1587 bp, synthetic construct
  misc_feature 1..1587: note = Variant of terminal deoxynucleotidyltransferase
  source 1..1587: mol_type = other DNA
atgcaccatcatcatcatcatggcggtagcggcagccacggcattcgtaccatcgattcggacttcgggaagaaacagcagaaaaaaggcgataaccacgatagttccgccacttatgaaatcaaatttcacgagtttgtgctgttcattctcgaagaaaaaatgggtgcgacgcgtcgtacttttctgacagatttagcccgcaagaaagggttccgcgtcgagaatgaactgaccgacgaagttacccacatcgtggcagaaaatctgtcacgctctgaagtattggcttggctgaaagaacacaagatggagaagaccaagcaattcgaactgctggatattagctggcttatcgaaagcatgaaagttggtaaaccggtggacaccaaggggaaataccagttggcggaatcggttgaggtgagtgcgaacccagatccgacagaaggtcgtgtaaacgagctgcctcctactatgaaaaccgtttctccgtatgcgtgtcaacgccgcaccaccctgaacaaccgtaatcaacgttttacggactcgctggagattcttcgtgaaaattacgagctgaaaggcaacgacgatactgcgctggaatttcgtcgtgctatctccgtgctgaaaagccttccgtttgaggtacgtagcctgaaagacacggaaggattgccctggatcagtgatgaagtcaaagggattatggaagaaatcatcgaagtcggggagtcgcgtgaagtgcaggccgtgctcaatgatgagtggtatcaaagcttccacgcatttacgcgtgtctttggagtgggggtgaagacagcagacaagtggtaccgtatgggtctgcgcaccctcgaggatgttcgttccagcaagaccctgaagttgaccccgtggcagaaagtaggtctgctgtattatgaagatcttgctcgcggcgttacgcgtgccgaagctgacgcgatttggctgctggttcaggatgcagtcgcaactttcgacccggatgcgatcgtggagattgtcggtggatttcgtcgtgggaaacctcagggtcacgacgttgatctgcttatcagttctccgggagcttctaaagagcaagaagaccaactcctgcagaaagtgatgaatctgtggaagaaacaagggttgttgctgtgtggtcgtctggaatggagtcagtgggaagatgggggttcgccttccggtaaggctgatgagggtgacgcggaggcgtcgtgctttctgatcctcaaactttatgatcatctggtgcgtaaaagtaaacgcaatatgccgactggttcgaacatgggcgagtccaaaccgtggaaagcaattaaagtagatctgctgcgttgcccctatggcagttttgcgtttgcgatgttgcagtggaccggaagccgcatgttccgtcgtgatctgcgctggtacgccctggaagagaagaacatgatgctggacaatcattcgctgtatgacatgacccgcggtatcttcctccctgctaaatcggaagaggaaattttcgaacatctggggcttgaatacctggaaccgttcgaacgtaacgca

SEQ ID NO: 4334 - protein, 529 aa, synthetic construct
  REGION 1..529: note = Variant of terminal deoxynucleotidyltransferase
MHHHHHHGGSGSHGIRTIDSDFGKKQQKKGDNHDSSATYEIKFHEFVLFILEEKMGATRRTFLTDLARKKGFRVENELTDEVTHIVAENLSRSEVLAWLKEHKMEKTKQFELLDISWLIESMKVGKPVDTKGKYQLAESVEVSANPDPTEGRVNELPPTMKTVSPYACQRRTTLNNRNQRFTDSLEILRENYELKGNDDTALEFRRAISVLKSLPFEVRSLKDTEGLPWISDEVKGIMEEIIEVGESREVQAVLNDEWYQSFHAFTRVFGVGVKTADKWYRMGLRTLEDVRSSKTLKLTPWQKVGLLYYEDLARGVTRAEADAIWLLVQDAVATFDPDAIVEIVGGFRRGKPQGHDVDLLISSPGASKEQEDQLLQKVMNLWKKQGLLLCGRLEWSQWEDGGSPSGKADEGDAEASCFLILKLYDHLVRKSKRNMPTGSNMGESKPWKAIKVDLLRCPYGSFAFAMLQWTGSRMFRRDLRWYALEEKNMMLDNHSLYDMTRGIFLPAKSEEEIFEHLGLEYLEPFERNA

SEQ ID NO: 4335 - DNA, 1587 bp, synthetic construct
  misc_feature 1..1587: note = Variant of terminal deoxynucleotidyltransferase
  source 1..1587: mol_type = other DNA
atgcaccatcatcatcatcatggcggtagcggcagccacggcattcgtaccatcgattcggacttcgggaagaaacagcagaaaaaaggcgataaccacgatagttccgccacttatgaaatcaaatttcacgagtttgtgctgttcattctcgaagaaaaaatgggtgcgacgcgtcgtacttttctgacagatttagcccgcaagaaagggttccgcgtcgagaatgaactgaccgacgaagttacccacatcgtggcagaaaatctgtcacgctctgaagtattggcttggctgaaagaacacaagatggagaagaccaagcaattcgaactgctggatattagctggcttatcgaaagcatgaaagttggtaaaccggtggacaccaaggggaaataccagttggcggaatcggttgaggtgagtgcgaacccagatccgacagaaggtcgtgtaaacgagctgcctcctactatgaaaaccgtttctccgtatgcgtgtcaacgccgcaccaccctgaacaaccgtaatcaacgttttacggactcgctggagattcttcgtgaaaattacgagctgaaaggcaacgacgatactgcgctggaatttcgtcgtgctatctccgtgctgaaaagccttccgtttgaggtacgtagcctgaaagacacggaaggattgccctggatcagtgatgaagtcaaagggattatggaagaaatcatcgaagtcggggagtcgcgtgaagtgcaggccgtgctcaatgatgagtggtatcaaagcttccacgcatttacgcgtgtctttggagtgggggtgaagacagcagacaagtggtaccgtatgggtctgcgcaccctcgaggatgttcgttccagcaagaccctgaagttgaccccgtggcagaaagtaggtctgctgtattatgaagatcttgctcgcggcgttacgcgtgccgaagctgacgcgatttggctgctggttcaggatgcagtcgcaactttcgacccggatgcgatcgtggagattgtcggtggatttcgtcgtgggaaacctcagggtcacgacgttgatctgcttatcagttctccgggagctgagaaagagcaagaagaccaactcctgcagaaagtgatgaatctgtggaagaaacaagggttgttgctgtgtggtcgtctggaatggagtcagtgggaagatgggggttcgccttccggtaaggctgatgagggtgacgcggaggcgtcgtgctttctgatcctcaaactttatgatcatctggtgcgtaaaagtaaacgcaatatgccgactggttcgaacatgggcgagtccaaaccgtggaaagcaattaaagtagatctgctgcgttgcccctatggcagttttgcgtttgcgatgttgcagtggaccggaagccgcatgttccgtcgtgatctgcgctggtacgccctggaagagaagaacatgatgctggacaatcattcgctgtatgacatgacccgcggtatcgggctccctgctaaatcggaagaggaaattttcgaacatctggggcttgaatacctggaaccgttcgaacgtaacgca

SEQ ID NO: 4336 - protein, 529 aa, synthetic construct
  REGION 1..529: note = Variant of terminal deoxynucleotidyltransferase
MHHHHHHGGSGSHGIRTIDSDFGKKQQKKGDNHDSSATYEIKFHEFVLFILEEKMGATRRTFLTDLARKKGFRVENELTDEVTHIVAENLSRSEVLAWLKEHKMEKTKQFELLDISWLIESMKVGKPVDTKGKYQLAESVEVSANPDPTEGRVNELPPTMKTVSPYACQRRTTLNNRNQRFTDSLEILRENYELKGNDDTALEFRRAISVLKSLPFEVRSLKDTEGLPWISDEVKGIMEEIIEVGESREVQAVLNDEWYQSFHAFTRVFGVGVKTADKWYRMGLRTLEDVRSSKTLKLTPWQKVGLLYYEDLARGVTRAEADAIWLLVQDAVATFDPDAIVEIVGGFRRGKPQGHDVDLLISSPGAEKEQEDQLLQKVMNLWKKQGLLLCGRLEWSQWEDGGSPSGKADEGDAEASCFLILKLYDHLVRKSKRNMPTGSNMGESKPWKAIKVDLLRCPYGSFAFAMLQWTGSRMFRRDLRWYALEEKNMMLDNHSLYDMTRGIGLPAKSEEEIFEHLGLEYLEPFERNA

SEQ ID NO: 4337 - DNA, 1587 bp, synthetic construct
  misc_feature 1..1587: note = Variant of terminal deoxynucleotidyltransferase
  source 1..1587: mol_type = other DNA
atgcaccatcatcatcatcatggcggtagcggcagccacggcattcgtaccatcgattcggacttcgggaagaaacagcagaaaaaaggcgataaccacgatagttccgccacttatgaaatcaaatttcacgagtttgtgctgttcattctcgaagaaaaaatgggtgcgacgcgtcgtacttttctgacagatttagcccgcaagaaagggttccgcgtcgagaatgaactgaccgacgaagttacccacatcgtggcagaaaatctgtcacgctctgaagtattggcttggctgaaagaacacaagatggagaagaccaagcaattcgaactgctggatattagctggcttatcgaaagcatgaaagttggtaaaccggtggacaccaaggggaaataccagttggcggaatcggttgaggtgagtgcgaacccagatccgacagaaggtcgtgtaaacgagctgcctcctactatgaaaaccgtttctccgtatgcgtgtcaacgccgcaccaccctgaacaaccgtaatcaacgttttacggactcgctggagattcttcgtgaaaattacgagctgaaaggcaacgacgatactgcgctggaatttcgtcgtgctatctccgtgctgaaaagccttccgtttgaggtacgtagcctgaaagacacggaaggattgccctggatcagtgatgaagtcaaagggattatggaagaaatcatcgaagtcggggagtcgcgtgaagtgcaggccgtgctcaatgatgagtggtatcaaagcttccacgcatttacgcgtgtctttggagtgggggtgaagacagcagacaagtggtaccgtatgggtctgcgcaccctcgaggatgttcgttccagcaagaccctgaagttgaccccgtggcagaaagtaggtctgctgtattatgaagatcttgctcgcggcgttacgcgtgccgaagctgacgcgatttggctgctggttcaggatgcagtcgcaactttcgacccggatgcgatcgtggagattgtcggtggatttcgtcgtgggaaacctcagggtcacgacgttgatctgcttatcagttctccgggagctgagaaagagcaagaagaccaactcctgcagaaagtgatgaatctgtggaagaaacaagggttgttgctgtgtggtcgtctggaatggagtcagtgggaagatgggggttcgccttccggtaaggctgatgagggtgacgcggaggcgtcgtgctttctgatcctcaaactttatgatcatctggtgcgtaaaagtaaacgcaatatgccgactggttcgaacatgggcgagtccaaaccgtggaaagcaattaaagtagatctgctgcgttgcccctatggcagttttgcgtttgcgatgttgcagtggaccggaagccgcatgttccgtcgtgatctgcgctggtacgccctggaagagaagaacatgatgctggacaatcattcgctgtatgacatgaccccgggtatcttcctccctgctaaatcggaagaggaaattttcgaacatctggggcttgaatacctggaaccgttcgaacgtaacgca

SEQ ID NO: 4338 - protein, 529 aa, synthetic construct
  REGION 1..529: note = Variant of terminal deoxynucleotidyltransferase
MHHHHHHGGSGSHGIRTIDSDFGKKQQKKGDNHDSSATYEIKFHEFVLFILEEKMGATRRTFLTDLARKKGFRVENELTDEVTHIVAENLSRSEVLAWLKEHKMEKTKQFELLDISWLIESMKVGKPVDTKGKYQLAESVEVSANPDPTEGRVNELPPTMKTVSPYACQRRTTLNNRNQRFTDSLEILRENYELKGNDDTALEFRRAISVLKSLPFEVRSLKDTEGLPWISDEVKGIMEEIIEVGESREVQAVLNDEWYQSFHAFTRVFGVGVKTADKWYRMGLRTLEDVRSSKTLKLTPWQKVGLLYYEDLARGVTRAEADAIWLLVQDAVATFDPDAIVEIVGGFRRGKPQGHDVDLLISSPGAEKEQEDQLLQKVMNLWKKQGLLLCGRLEWSQWEDGGSPSGKADEGDAEASCFLILKLYDHLVRKSKRNMPTGSNMGESKPWKAIKVDLLRCPYGSFAFAMLQWTGSRMFRRDLRWYALEEKNMMLDNHSLYDMTPGIFLPAKSEEEIFEHLGLEYLEPFERNA

SEQ ID NO: 4339 - DNA, 1587 bp, synthetic construct
  misc_feature 1..1587: note = Variant of terminal deoxynucleotidyltransferase
  source 1..1587: mol_type = other DNA
atgcaccatcatcatcatcatggcggtagcggcagccacggcattcgtaccatcgattcggacttcgggaagaaacagcagaaaaaaggcgataaccacgatagttccgccacttatgaaatcaaatttcacgagtttgtgctgttcattctcgaagaaaaaatgggtgcgacgcgtcgtacttttctgacagatttagcccgcaagaaagggttccgcgtcgagaatgaactgaccgacgaagttacccacatcgtggcagaaaatctgtcacgctctgaagtattggcttggctgaaagaacacaagatggagaagaccaagcaattcgaactgctggatattagctggcttatcgaaagcatgaaagttggtaaaccggtggacaccaaggggaaataccagttggcggaatcggttgaggtgagtgcgaacccagatccgacagaaggtcgtgtaaacgagctgcctcctactatgaaaaccgtttctccgtatgcgtgtcaacgccgcaccaccctgaacaaccgtaatcaacgttttacggactcgctggagattcttcgtgaaaattacgagctgaaaggcaacgacgatactgcgctggaatttcgtcgtgctatctccgtgctgaaaagccttccgtttgaggtacgtagcctgaaagacacggaaggattgccctggatcagtgatgaagtcaaagggattatggaagaaatcatcgaagtcggggagtcgcgtgaagtgcaggccgtgctcaatgatgagtggtatcaaagcttccacgcatttacgcgtgtctttggagtgggggtgaagacagcagacaagtggtaccgtatgggtctgcgcaccctcgaggatgttcgttccagcaagaccctgaagttgaccccgtggcagaaagtaggtctgctgtattatgaagatcttgctcgcggcgttacgcgtgccgaagctgacgcgatttggctgctggttcaggatgcagtcgcaactttcgacccggatgcgatcgtggagattgtcggtggatttcgtcgtgggaaacctcagggtcacgacgttgatctgcttatcagttctccgggagctgaaaaagagcaagaagaccaactcctgcagaaagtgatgaatctgtggaagaaacaagggttgttgctgtgtggtcgtctggaatggagtcagtgggaatgggggggttcgccttccggtaaggctgatgagggtgacgcggaggcgtcgtgctttctgatcctcaaactttatgatcatctggtgcgtaaaagtaaacgcaatatgccgactggttcgaacatgggcgagtccaaaccgtggaaagcaattaaagtagatctgctgcgttgcccctacggcagttttgcgtttgcgatgttgcagtggaccggaagccgcatgttccgtcgtgatctgcgctggtacgccctggaagagaagaacatgatgctggacaatcattcgctgtatgacatgacccgcggtatccaactccctgctaaatcggaagaggaaattttcgaacatctggggcttgaatacctggaaccgttcgaacgtaacgca

SEQ ID NO: 4340 - protein, 529 aa, synthetic construct
  REGION 1..529: note = Variant of terminal deoxynucleotidyltransferase
MHHHHHHGGSGSHGIRTIDSDFGKKQQKKGDNHDSSATYEIKFHEFVLFILEEKMGATRRTFLTDLARKKGFRVENELTDEVTHIVAENLSRSEVLAWLKEHKMEKTKQFELLDISWLIESMKVGKPVDTKGKYQLAESVEVSANPDPTEGRVNELPPTMKTVSPYACQRRTTLNNRNQRFTDSLEILRENYELKGNDDTALEFRRAISVLKSLPFEVRSLKDTEGLPWISDEVKGIMEEIIEVGESREVQAVLNDEWYQSFHAFTRVFGVGVKTADKWYRMGLRTLEDVRSSKTLKLTPWQKVGLLYYEDLARGVTRAEADAIWLLVQDAVATFDPDAIVEIVGGFRRGKPQGHDVDLLISSPGAEKEQEDQLLQKVMNLWKKQGLLLCGRLEWSQWEWGGSPSGKADEGDAEASCFLILKLYDHLVRKSKRNMPTGSNMGESKPWKAIKVDLLRCPYGSFAFAMLQWTGSRMFRRDLRWYALEEKNMMLDNHSLYDMTRGIQLPAKSEEEIFEHLGLEYLEPFERNA

SEQ ID NO: 4341 - DNA, 1587 bp, synthetic construct
  misc_feature 1..1587: note = Variant of terminal deoxynucleotidyltransferase
  source 1..1587: mol_type = other DNA
atgcaccatcatcatcatcatggcggtagcggcagccacggcattcgtaccatcgattcggacttcgggaagaaacagcagaaaaaaggcgataaccacgatagttccgccacttatgaaatcaaatttcacgagtttgtgctgttcattctcgaagaaaaaatgggtgcgacgcgtcgtacttttctgacagatttagcccgcaagaaagggttccgcgtcgagaatgaactgaccgacgaagttacccacatcgtggcagaaaatctgtcacgctctgaagtattggcttggctgaaagaacacaagatggagaagaccaagcaattcgaactgctggatattagctggcttatcgaaagcatgaaagttggtaaaccggtggacaccaaggggaaataccagttggcggaatcggttgaggtgagtgcgaacccagatccgacagaaggtcgtgtaaacgagctgcctcctactatgaaaaccgtttctccgtatgcgtgtcaacgccgcaccaccctgaacaaccgtaatcaacgttttacggactcgctggagattcttcgtgaaaattacgagctgaaaggcaacgacgatactgcgctggaatttcgtcgtgctatctccgtgctgaaaagccttccgtttgaggtacgtagcctgaaagacacggaaggattgccctggatcagtgatgaagtcaaagggattatggaagaaatcatcgaagtcggggagtcgcgtgaagtgcaggccgtgctcaatgatgagtggtatcaaagcttccacgcatttacgcgtgtctttggagtgggggtgaagacagcagacaagtggtaccgtatgggtctgcgcaccctcgaggatgttcgttccagcaagaccctgaagttgaccccgtggcagaaagtaggtctgctgtattatgaagatcttgctcgcggcgttacgcgtgccgaagctgacgcgatttggctgctggttcaggatgcagtcgcaactttcgacccggatgcgatcgtggagattgtcggtggatttcgtcgtgggaaacctcagggtcacgacgttgatctgcttatcagttctccgggagctcggaaagagcaagaagaccaactcctgcagaaagtgatgaatctgtggaagaaacaagggttgttgctgtgtggtcgtctggaatggagtcagtgggaagatgggggttcgccttccggtaaggctgatgagggtgacgcggaggcgtcgtgctttctgatcctcaaactttatgatcatctggtgcgtaaaagtaaacgcaatatgccgactggttcgaacatgggcgagtccaaaccgtggaaagcaattaaagtagatctgctgcgttgcccctatggcagttttgcgtttgcgatgttgcagtggaccggaagccgcatgttccgtcgtgatctgcgctggtacgccctggaagagaagaacatgatgctggacaatcattcgctgtatgacatgacccgcggtatcttcctccctgctaaatcggaagaggaaattttcgaacatctggggcttgaatacctggaaccgttcgaacgtaacgca

SEQ ID NO: 4342 - protein, 529 aa, synthetic construct
  REGION 1..529: note = Variant of terminal deoxynucleotidyltransferase
MHHHHHHGGSGSHGIRTIDSDFGKKQQKKGDNHDSSATYEIKFHEFVLFILEEKMGATRRTFLTDLARKKGFRVENELTDEVTHIVAENLSRSEVLAWLKEHKMEKTKQFELLDISWLIESMKVGKPVDTKGKYQLAESVEVSANPDPTEGRVNELPPTMKTVSPYACQRRTTLNNRNQRFTDSLEILRENYELKGNDDTALEFRRAISVLKSLPFEVRSLKDTEGLPWISDEVKGIMEEIIEVGESREVQAVLNDEWYQSFHAFTRVFGVGVKTADKWYRMGLRTLEDVRSSKTLKLTPWQKVGLLYYEDLARGVTRAEADAIWLLVQDAVATFDPDAIVEIVGGFRRGKPQGHDVDLLISSPGARKEQEDQLLQKVMNLWKKQGLLLCGRLEWSQWEDGGSPSGKADEGDAEASCFLILKLYDHLVRKSKRNMPTGSNMGESKPWKAIKVDLLRCPYGSFAFAMLQWTGSRMFRRDLRWYALEEKNMMLDNHSLYDMTRGIFLPAKSEEEIFEHLGLEYLEPFERNA

SEQ ID NO: 4343 - DNA, 1587 bp, synthetic construct
  misc_feature 1..1587: note = Variant of terminal deoxynucleotidyltransferase
  source 1..1587: mol_type = other DNA
atgcaccatcatcatcatcatggcggtagcggcagccacggcattcgtaccatcgattcggacttcgggaagaaacagcagaaaaaaggcgataaccacgatagttccgccacttatgaaatcaaatttcacgagtttgtgctgttcattctcgaagaaaaaatgggtgcgacgcgtcgtacttttctgacagatttagcccgcaagaaagggttccgcgtcgagaatgaactgaccgacgaagttacccacatcgtggcagaaaatctgtcacgctctgaagtattggcttggctgaaagaacacaagatggagaagaccaagcaattcgaactgctggatattagctggcttatcgaaagcatgaaagttggtaaaccggtggacaccaaggggaaataccagttggcggaatcggttgaggtgagtgcgaacccagatccgacagaaggtcgtgtaaacgagctgcctcctactatgaaaaccgtttctccgtatgcgtgtcaacgccgcaccatcctgaacaaccgtaatcaacgttttacggactcgctggagattcttcgtgaaaattacgagctgaaaggcaacgacgatactgcgctggaatttcgtcgtgctatctccgtgctgaaaagccttccgtttgaggtacgtagcctgaaagacacggaaggattgccctggatcagtgatgaagtcaaagggattatggaagaaatcatcgaagtcggggagtcgcgtgaagtgcaggccgtgctcaatgatgagtggtatcaaagcttccacgcatttacgcgtgtctttggagtgggggtgaagacagcagacaagtggtaccgtatgggtctgcgcaccctcgaggatgttcgttccagcaagaccctgaagttgaccccgtggcagaaagtaggtctgctgtattatgaagatcttgctcgcggcgttacgcgtgccgaagctgacgcgatttggctgctggttcaggatgcagtcgcaactttcgacccggatgcgatcgtggagattgtcggtggatttcgtcgtgggaaacctcagggtcacgacgttgatctgcttatcagttctccgggagctagtaaagagcaagaagaccaactcctgcagaaagtgatgaatctgtggaagaaacaagggttgttgctgtgtggtcgtctggaatggagtcagtgggaagacgggggttcgccttccggtaaggctgatgagggtgacgcggaggcgtcgtgctttctgatcctcaaactttatgatcatctggtgcgtaaaagtaaacgcaatatgccgactggttcgaacatgggcgagtccaaaccgtggaaagcaattaaagtagatctgctgcgttgccccgtcggcagttttgcgtttgcgatgttgcagtggaccggaagccgcatgttccgtcgtgatctgcgctggtacgccctggaagagaagaacatgatgctggacaatcattcgctgtatgacatgagtcgtggtatctttctccctgctaaatcggaagaggaaattttcgaacatctggggcttgaatacctggaaccgttcgaacgtaacgca

SEQ ID NO: 4344 - protein, 529 aa, synthetic construct
  REGION 1..529: note = Variant of terminal deoxynucleotidyltransferase
MHHHHHHGGSGSHGIRTIDSDFGKKQQKKGDNHDSSATYEIKFHEFVLFILEEKMGATRRTFLTDLARKKGFRVENELTDEVTHIVAENLSRSEVLAWLKEHKMEKTKQFELLDISWLIESMKVGKPVDTKGKYQLAESVEVSANPDPTEGRVNELPPTMKTVSPYACQRRTILNNRNQRFTDSLEILRENYELKGNDDTALEFRRAISVLKSLPFEVRSLKDTEGLPWISDEVKGIMEEIIEVGESREVQAVLNDEWYQSFHAFTRVFGVGVKTADKWYRMGLRTLEDVRSSKTLKLTPWQKVGLLYYEDLARGVTRAEADAIWLLVQDAVATFDPDAIVEIVGGFRRGKPQGHDVDLLISSPGASKEQEDQLLQKVMNLWKKQGLLLCGRLEWSQWEDGGSPSGKADEGDAEASCFLILKLYDHLVRKSKRNMPTGSNMGESKPWKAIKVDLLRCPVGSFAFAMLQWTGSRMFRRDLRWYALEEKNMMLDNHSLYDMSRGIFLPAKSEEEIFEHLGLEYLEPFERNA

SEQ ID NO: 4345 - DNA, 1587 bp, synthetic construct
  misc_feature 1..1587: note = Variant of terminal deoxynucleotidyltransferase
  source 1..1587: mol_type = other DNA
atgcaccagcatcatcatcatggcggtagcggcagccacggcattcgtaccatcgattcggacttcgggaagaaacagcagaaaaaaggcgataaccacgatagttccgccacttatgaaatcaaatttcacgagtttgtgctgttcattctcgaagaaaaaatgggtgcgacgcgtcgtacttttctgacagatttagcccgcaagaaagggttccgcgtcgagaatgaactgaccgacgaagttacccacatcgtggcagaaaatctgtcacgctctgaagtattggcttggctgaaagaacacaagatggagaagaccaagcaattcgaactgctggatattagctggcttatcgaaagcatgaaagttggtaaaccggtggacaccaaggggaaataccagttggcggaatcggttgaggtgagtgcgaacccagatccgacagaaggtcgtgtaaacgagctgcctcctactatgaaaaccgtttctccgtatgcgtgtcaacgccgcaccaccctgaacaaccgtaatcaacgttttacggactcgctggagattcttcgtgaaaattacgagctgaaaggcaacgacgatactgcgctggaatttcgtcgtgctatctccgtgctgaaaagccttccgtttgaggtacgtagcctgaaagacacggaaggattgccctggatcagtgatgaagtcaaagggattatggaagaaatcatcgaagtcggggagtcgcgtgaagtgcaggccgtgctcaatgatgagtggtatcaaagcttccacgcatttacgcgtgtctttggagtgggggtgaagacagcagacaagtggtaccgtatgggtctgcgcaccctcgaggatgttcgttccagcaagaccctgaagttgaccccgtggcagaaagtaggtctgctgtattatgaagatcttgctcgcggcgttacgcgtgccgaagctgacgcgatttggctgctggttcaggatgcagtcgcaactttcgacccggatgcgatcgtggagattgtcggtggatttcgtcgtgggaaacctcagggtcacgacgttgatctgcttatcagttctccgggagctgagaaagagcaagaagaccaactcctgcagaaagtgatgaatctgtggaagaaacaagggttgttgctgtgtggtcgtctggaatggagtcagtgggaagatgggggttcgccttccggtaaggctgatgagggtgacgcggaggcgtcgtgctttctgatcctcaaactttatgatcatctggtgcgtaaaagtaaacgcaatatgccgactggttcgaacatgggcgagtccaaaccgtggaaagcaattaaagtagatctgctgcgttgcccctatggcagttttgcgtttgcgatgttgcagtggaccggaagccgcatgttccgtcgtgatctgcgctggtacgccctggaagagaagaacatgatgctggacaatcattcgctgtatgacatgacccgcggtatcttcctccctgctaaatcggaagaggaaattttcgaacatctggggcttgaatacctggaaccgttcgaacgtaacgca

SEQ ID NO: 4346 - protein, 529 aa, synthetic construct
  REGION 1..529: note = Variant of terminal deoxynucleotidyltransferase
MHQHHHHGGSGSHGIRTIDSDFGKKQQKKGDNHDSSATYEIKFHEFVLFILEEKMGATRRTFLTDLARKKGFRVENELTDEVTHIVAENLSRSEVLAWLKEHKMEKTKQFELLDISWLIESMKVGKPVDTKGKYQLAESVEVSANPDPTEGRVNELPPTMKTVSPYACQRRTTLNNRNQRFTDSLEILRENYELKGNDDTALEFRRAISVLKSLPFEVRSLKDTEGLPWISDEVKGIMEEIIEVGESREVQAVLNDEWYQSFHAFTRVFGVGVKTADKWYRMGLRTLEDVRSSKTLKLTPWQKVGLLYYEDLARGVTRAEADAIWLLVQDAVATFDPDAIVEIVGGFRRGKPQGHDVDLLISSPGAEKEQEDQLLQKVMNLWKKQGLLLCGRLEWSQWEDGGSPSGKADEGDAEASCFLILKLYDHLVRKSKRNMPTGSNMGESKPWKAIKVDLLRCPYGSFAFAMLQWTGSRMFRRDLRWYALEEKNMMLDNHSLYDMTRGIFLPAKSEEEIFEHLGLEYLEPFERNA

SEQ ID NO: 4347 - DNA, 1587 bp, synthetic construct
  misc_feature 1..1587: note = Variant of terminal deoxynucleotidyltransferase
  source 1..1587: mol_type = other DNA
atgcaccatcatcatcatcatggcggtagcggcagccacggcattcgtaccatcgattcggacttcgggaagaaacagcagaaaaaaggcgataaccacgatagttccgccacttatgaaatcaaatttcacgagtttgtgctgttcattctcgaagaaaaaatgggtgcgacgcgtcgtacttttctgacagatttagcccgcaagaaagggttccgcgtcgagaatgaactgaccgacgaagttacccacatcgtggcagaaaatctgtcacgctctgaagtattggcttggctgaaagaacacaagatggagaagaccaagcaattcgaactgctggatattagctggcttatcgaaagcatgaaagttggtaaaccggtggacaccaaggggaaataccagttggcggaatcggttgaggtgagtgcgaacccagatccgacagaaggtcgtgtaaacgagctgcctcctactatgaaaaccgtttctccgtatgcgtgtcaacgccgcaccaccctgaacaaccgtaatcaacgttttacggactcgctggagattcttcgtgaaaattacgagctgaaaggcaacgacgatactgcgctggaatttcgtcgtgctatctccgtgctgaaaagccttccgtttgaggtacgtagcctgaaagacacggaaggattgccctggatcagtgatgaagtcaaagggattatggaagaaatcatcgaagtcggggagtcgcgtgaagtgcaggccgtgctcaatgatgagtggtatcaaagcttccacgcatttacgcgtgtctttggagtgggggtgaagacagcagacaagtggtaccgtatgggtctgcgcaccctcgaggatgttcgttccagcaagaccctgaagttgaccccgtggcagaaagtaggtctgctgtattatgaagatcttgctcgcggcgttacgcgtgccgaagctgacgcgatttggctgctggttcaggatgcagtcgcaactttcgacccggatgcgatcgtggagattgtcggtggatttcgtcgtgggaaacctcagggtcacgacgttgatctgcttatcagttctccgggagctgagaaagagcaagaagaccaactcctgcagaaagtgatgaatctgtggaagaaacaagggttgttgctgtgtggtcgtctggaatggagtcagtgggaagatgggaaatcgccttccggtaaggctgatgagggtgacgcggaggcgtcgtgctttctgatcctcaaactttatgatcatctggtgcgtaaaagtaaacgcaatatgccgactggttcgaacatgggcgagtccaaaccgtggaaagcaattaaagtagatctgctgcgttgcccctatggcagttttgcgtttgcgatgttgcagtggaccggaagccgcatgttccgtcgtgatctgcgctggtacgccctggaagagaagaacatgatgctggacaaccattcgctgtatgacatgacccgcggtatcttcctccctgctaaatcggaagaggagattttcgaacatctggggcttgaatacctggaaccgttcgaacgtaacgca

SEQ ID NO: 4348 - protein, 529 aa, synthetic construct
  REGION 1..529: note = Variant of terminal deoxynucleotidyltransferase
MHHHHHHGGSGSHGIRTIDSDFGKKQQKKGDNHDSSATYEIKFHEFVLFILEEKMGATRRTFLTDLARKKGFRVENELTDEVTHIVAENLSRSEVLAWLKEHKMEKTKQFELLDISWLIESMKVGKPVDTKGKYQLAESVEVSANPDPTEGRVNELPPTMKTVSPYACQRRTTLNNRNQRFTDSLEILRENYELKGNDDTALEFRRAISVLKSLPFEVRSLKDTEGLPWISDEVKGIMEEIIEVGESREVQAVLNDEWYQSFHAFTRVFGVGVKTADKWYRMGLRTLEDVRSSKTLKLTPWQKVGLLYYEDLARGVTRAEADAIWLLVQDAVATFDPDAIVEIVGGFRRGKPQGHDVDLLISSPGAEKEQEDQLLQKVMNLWKKQGLLLCGRLEWSQWEDGKSPSGKADEGDAEASCFLILKLYDHLVRKSKRNMPTGSNMGESKPWKAIKVDLLRCPYGSFAFAMLQWTGSRMFRRDLRWYALEEKNMMLDNHSLYDMTRGIFLPAKSEEEIFEHLGLEYLEPFERNA

SEQ ID NO: 4349 - DNA, 1587 bp, synthetic construct
  misc_feature 1..1587: note = Variant of terminal deoxynucleotidyltransferase
  source 1..1587: mol_type = other DNA
atgcaccatcatcatcatcatggcggtagcggcagccacggcattcgtaccatcgattcggacttcgggaagaaacagcagaaaaaaggcgataaccacgatagttccgccacttatgaaatcaaatttcacgagtttgtgctgttcattctcgaagaaaaaatgggtgcgacgcgtcgtacttttctgacagatttagcccgcaagaaagggttccgcgtcgagaatgaactgaccgacgaagttacccacatcgtggcagaaaatctgtcacgctctgaagtattggcttggctgaaagaacacaagatggagaagaccaagcaattcgaactgctggatattagctggcttatcgaaagcatgaaagttggtaaaccggtggacaccaaggggaaataccagttggcggaatcggttgaggtgagtgcgaacccagatccgacagaaggtcgtgtaaacgagctgcctcctactatgaaaaccgtttctccgtatgcgtgtcaacgccgcaccaccctgaacaaccgtaatcaacgttttacggactcgctggagattcttcgtgaaaattacgagctgaaaggcaacgacgatactgcgctggaatttcgtcgtgctatctccgtgctgaaaagccttccgtttgaggtacgtagcctgaaagacacggaaggattgccctggatcagtgatgaagtcaaagggattatggaagaaatcatcgaagtcggggagtcgcgtgaagtgcaggccgtgctcaatgatgagtggtatcaaagcttccacgcatttacgcgtgtctttggagtgggggtgaagacagcagacaagtggtaccgtatgggtctgcgcaccctcgaggatgttcgttccagcaagaccctgaagttgaccccgtggcagaaagtaggtctgctgtattatgaagatcttgctcgcggcgttacgcgtgccgaagctgacgcgatttggctgctggttcaggatgcagtcgcaactttcgacccggatgcgatcgtggagattgtcggtggatttcgtcgtgggaaacctcagggtcacgacgttgatctgcttatcagttctccgggagctgagaaagagcaagaagaccaactcctgcagaaagtgatgaatctgtggaagaaacaagggttgttgctgtgtggtcgtctggaatggagtcagtgggaagatgggggttcgccttccggtaaggctgatgagggtgacgcggaggcgtcgtgctttctgatcctcaaactttatgatcatctggtgcgtaaaagtaaacgcaatatgccgactggttcgaacatgggcgagtccaaaccgtggaaagcaattaaagtagatctgctgcgttgcccctatggcagttttgcgtttgcgatgttgcagtggaccggaagccgcatgttccgtcgtgatctgcgctggtacgccctggaagagaagaacatgatgctggacaatcattcgctgtatgacatgacccgcggtatccagctccctgctaaatcggaagaggaaattttcgaacatctggggcttgaatacctggaaccgttcgaacgtaacgca

SEQ ID NO: 4350 - protein, 529 aa, synthetic construct
  REGION 1..529: note = Variant of terminal deoxynucleotidyltransferase
MHHHHHHGGSGSHGIRTIDSDFGKKQQKKGDNHDSSATYEIKFHEFVLFILEEKMGATRRTFLTDLARKKGFRVENELTDEVTHIVAENLSRSEVLAWLKEHKMEKTKQFELLDISWLIESMKVGKPVDTKGKYQLAESVEVSANPDPTEGRVNELPPTMKTVSPYACQRRTTLNNRNQRFTDSLEILRENYELKGNDDTALEFRRAISVLKSLPFEVRSLKDTEGLPWISDEVKGIMEEIIEVGESREVQAVLNDEWYQSFHAFTRVFGVGVKTADKWYRMGLRTLEDVRSSKTLKLTPWQKVGLLYYEDLARGVTRAEADAIWLLVQDAVATFDPDAIVEIVGGFRRGKPQGHDVDLLISSPGAEKEQEDQLLQKVMNLWKKQGLLLCGRLEWSQWEDGGSPSGKADEGDAEASCFLILKLYDHLVRKSKRNMPTGSNMGESKPWKAIKVDLLRCPYGSFAFAMLQWTGSRMFRRDLRWYALEEKNMMLDNHSLYDMTRGIQLPAKSEEEIFEHLGLEYLEPFERNA

SEQ ID NO: 4351 - DNA, 1587 bp, synthetic construct
  misc_feature 1..1587: note = Variant of terminal deoxynucleotidyltransferase
  source 1..1587: mol_type = other DNA
atgcaccatcatcatcatcatggcggtagcggcagccacggcattcgtaccatcgattcggacttcgggaagaaacagcagaaaaaaggcgataaccacgatagttccgccacttatgaaatcaaatttcacgagtttgtgctgttcattctcgaagaaaaaatgggtgcgacgcgtcgtacttttctgacagatttagcccgcaagaaagggttccgcgtcgagaatgaactgacagacgaagttacccacatcgtggcagaaaatctgtcacgctctgaagtattggcttggctgaaagaacacaagatggagaagaccaagcaattcgaactgctggatattagctggcttatcgaaagcatgaaagttggtaaaccggtggacaccaaggggaaataccagttggcggaatcggttgaggtgagtgcgaacccagatccgacagaaggtcgtgtaaacgagctgcctcctactatgaaaaccgtttctccgtatgcgtgtcaacgccgcaccaccctgaacaaccgtaatcaacgttttacggactcgctggagattcttcgtgaaaattacgagctgaaaggcaacgacgatactgcgctggaatttcgtcgtgctatctccgtgctgaaaagccttccgtttgaggtacgtagcctgaaagacacggaaggattgccctggatcagtgatgaagtcaaagggattatggaagaaatcatcgaagtcggggagtcgcgtgaagtgcaggccgtgctcaatgatgagtggtatcaaagcttccacgcatttacgcgtgtctttggagtgggggtgaagacagcagacaagtggtaccgtatgggtctgcgcaccctcgaggatgttcgttccagcaagaccctgaagttgaccccgtggcagaaagtaggtctgctgtattatgaagatcttgctcgcggcgttacgcgtgccgaagctgacgcgatttggctgctggttcaggatgcagtcgcaactgtcgacccggatgcgatcgtggagattgtcggtggatttcgtcgtgggaaacctcagggtcacgacgttgatctgcttatcagttctccgggagctgagaaagagcaagaagaccaactcctgcagaaagtgatgaatctgtggaagaaacaagggttgttgctgtgtggtcgtctggaatggagtcagtgggaagatgggggttcgccttccggtaaggctgatgagggtgacgcggaggcgtcgtgctttctgatcctcaaactttatgatcatctggtgcgtaaaagtaaacgcaatatgccgactggttcgaacatgggcgagtccaaaccgtggaaagcaattaaagtagatctgctgcgttgcccctatggcagttttgcgtttgcgatgttgcagtggaccggaagccgcatgttccgtcgtgatctgcgctggtacgccctggaagagaagaacatgatgctggacaatcattcgctgtatgacatgacccgcggtatcttcctccctgctaaatcggaagaggaaattttcgaacatctggggcttgaatacctggaaccgttcgaacgtaacgca

SEQ ID NO: 4352 - protein, 529 aa, synthetic construct
  REGION 1..529: note = Variant of terminal deoxynucleotidyltransferase
MHHHHHHGGSGSHGIRTIDSDFGKKQQKKGDNHDSSATYEIKFHEFVLFILEEKMGATRRTFLTDLARKKGFRVENELTDEVTHIVAENLSRSEVLAWLKEHKMEKTKQFELLDISWLIESMKVGKPVDTKGKYQLAESVEVSANPDPTEGRVNELPPTMKTVSPYACQRRTTLNNRNQRFTDSLEILRENYELKGNDDTALEFRRAISVLKSLPFEVRSLKDTEGLPWISDEVKGIMEEIIEVGESREVQAVLNDEWYQSFHAFTRVFGVGVKTADKWYRMGLRTLEDVRSSKTLKLTPWQKVGLLYYEDLARGVTRAEADAIWLLVQDAVATVDPDAIVEIVGGFRRGKPQGHDVDLLISSPGAEKEQEDQLLQKVMNLWKKQGLLLCGRLEWSQWEDGGSPSGKADEGDAEASCFLILKLYDHLVRKSKRNMPTGSNMGESKPWKAIKVDLLRCPYGSFAFAMLQWTGSRMFRRDLRWYALEEKNMMLDNHSLYDMTRGIFLPAKSEEEIFEHLGLEYLEPFERNA

SEQ ID NO: 4353 - DNA, 1587 bp, synthetic construct
  misc_feature 1..1587: note = Variant of terminal deoxynucleotidyltransferase
  source 1..1587: mol_type = other DNA
atgcaccatcatcatcatcatggcggtagcggcagccacggcattcgtaccatcgattcggacttcgggaagaaacagcagaaaaaaggcgataaccacgatagttccgccacttatgaaatcaaatttcacgagtttgtgctgttcattctcgaagaaaaaatgggtgcgacgcgtcgtacttttctgacagatttagcccgcaagaaagggttccgcgtcgagaatgaactgaccgacgaagttacccacatcgtggcagaaaatctgtcacgctctgaagtattggcttggctgaaagaacacaagatggagaagaccaagcaattcgaactgctggatattagctggcttatcgaaagcatgaaagttggtaaaccggtggacaccaaggggaaataccagttggcggaatcggttgaggtgagtgcgaacccagatccgacagaaggtcgtgtaaacgagctgcctcctactatgaaaaccgtttctccgtatgcgtgtcaacgccgcaccaccctgaacaaccgtaatcaacgttttacggactcgctggagattcttcgtgaaaattacgagctgaaaggcaacgacgatactgcgctggaatttcgtcgtgctatctccgtgctgaaaagccttccgtttgaggtacgtagcctgaaagacacggaaggattgccctggatcagtgatgaagtcaaagggattatggaagaaatcatcgaagtcggggagtcgcgtgaagtgcaggccgtgctcaatgatgagtggtatcaaagcttccacgcatttacgcgtgtctttggagtgggggtgaagacagcagacaagtggtaccgtatgggtctgcgcaccctcgaggatgttcgttccagcaagaccctgaagttgaccccgtggcagaaagtaggtctgctgtattatgaagatcttgctcgcggcgttacgcgtgccgaagctgacgcgatttggctgctggttcaggatgcagtcgcaactgtcgacccggatgcgatcgtggagattgtcggtggatttcgtcgtgggaaacctcagggtcacgacgttgatctgcttatcagttctccgggagctgagaaagagcaagaagaccaactcctgcagaaagtgatgaatctgtggaagaaacaagggttgttgctgtgtggtcgtctggaatggagtcagtgggaagatgggggttcgccttccggtaaggctgatgagggtgacgcggaggcgtcgtgctttctgatcctcaaactttatgatcatctggtgcgtaaaagtaaacgcaatatgccgactggttcgaacatgggcgagtccaaaccgtggaaagcaattaaagtagatctgctgcgttgcccctatggcagttttgcgtttgcgatgttgcagtggaccggaagccgcatgttccgtcgtgatctgcgccgctacgccctggaagagaagaacatgatgctggacaatcattcgctgtatgacatgacccgcggtatcttcctccctgctaaatcggaagagcgcattttcgaacatctggggcttgaatacctggaaccgttcgaacgtaacgca

SEQ ID NO: 4354 - protein, 529 aa, synthetic construct
  REGION 1..529: note = Variant of terminal deoxynucleotidyltransferase
MHHHHHHGGSGSHGIRTIDSDFGKKQQKKGDNHDSSATYEIKFHEFVLFILEEKMGATRRTFLTDLARKKGFRVENELTDEVTHIVAENLSRSEVLAWLKEHKMEKTKQFELLDISWLIESMKVGKPVDTKGKYQLAESVEVSANPDPTEGRVNELPPTMKTVSPYACQRRTTLNNRNQRFTDSLEILRENYELKGNDDTALEFRRAISVLKSLPFEVRSLKDTEGLPWISDEVKGIMEEIIEVGESREVQAVLNDEWYQSFHAFTRVFGVGVKTADKWYRMGLRTLEDVRSSKTLKLTPWQKVGLLYYEDLARGVTRAEADAIWLLVQDAVATVDPDAIVEIVGGFRRGKPQGHDVDLLISSPGAEKEQEDQLLQKVMNLWKKQGLLLCGRLEWSQWEDGGSPSGKADEGDAEASCFLILKLYDHLVRKSKRNMPTGSNMGESKPWKAIKVDLLRCPYGSFAFAMLQWTGSRMFRRDLRRYALEEKNMMLDNHSLYDMTRGIFLPAKSEERIFEHLGLEYLEPFERNA

SEQ ID NO: 4355 - DNA, 1587 bp, synthetic construct
  misc_feature 1..1587: note = Variant of terminal deoxynucleotidyltransferase
  source 1..1587: mol_type = other DNA
atgcaccatcatcatcatcatggcggtagcggcagccacggcattcgtaccatcgattcggacttcgggaagaaacagcagaaaaaaggcgataaccacgatagttccgccacttatgaaatcaaatttcacgagtttgtgctgttcattctcgaagaaaaaatgggtgcgacgcgtcgtacttttctgacagatttagcccgcaagaaagggttccgcgtcgagaatgaactgaccgacgaagttacccacatcgtggcagaaaatctgtcacgctctgaagtattggcttggctgaaagaacacaagatggagaagaccaagcaattcgaactgctggatattagctggcttatcgaaagcatgaaagttggtaaaccggtggacaccaaggggaaataccagttggcggaatcggttgaggtgagtgcgaacccagatccgacagaaggtcgtgtaaacgagctgcctcctactatgaaaaccgtttctccgtatgcgtgtcaacgccgcaccaccctgaacaaccgtaatcaacgttttacggactcgctggagattcttcgtgaaaattacgagctgaaaggcaacgacgatactgcgctggaatttcgtcgtgctatctccgtgctgaaaagccttccgtttgaggtacgtagcctgaaagacacggaaggattgccctggatcagtgatgaagtcaaagggattatggaagaaatcatcgaagtcggggagtcgcgtgaagtgcaggccgtgctcaatgatgagtggtatcaaagcttccacgcatttacgcgtgtctttggagtgggggtgaagacagcagacaagtggtaccgtatgggtctgcgcaccctcgaggatgttcgttccagcaagaccctgaagttgaccccgtggcagaaagtaggtctgctgtattatgaagatcttgctcgcggcgttacgcgtgccgaagctgacgcgatttggctgctggttcaggatgcagtcgcaactttcgacccggatgcgatcgtggagattgtcggtggatttcgtcgtgggaaacctcagggtcacgacgttgatctgcttatcagttctccgggagctgagaaagagcaagaagaccaactcctgcagaaagtgatgaatctgtggaagaaacaagggttgttgctgtgtggtcgtctggaatggagtcagtgggaagatgggggttcgccttccggtaaggctgatgagggtgacgcggaggcgtcgtgctttctgatcctcaaactttatgatcatctggtgcgtaaaagtaaacgcaatatgccgactggttcgaacatgggcgagtccaaaccgtggaaagcaattaaagtagatctgctgcgttgcccctatggcagttttgcgtttgcgatgttgcagtggaccggaagccgcatgttccgtcgtgatctgcgctggtacgccctggaagagaagaacatgatgctggacaatcattcgctgtatgaccggacccgcggtatcttcctccctgctaaatcggaagaggaaattttcgaacatctggggcttgaatacctggaaccgttcgaacgtaacgca

SEQ ID NO: 4356 - protein, 529 aa, synthetic construct
  REGION 1..529: note = Variant of terminal deoxynucleotidyltransferase
MHHHHHHGGSGSHGIRTIDSDFGKKQQKKGDNHDSSATYEIKFHEFVLFILEEKMGATRRTFLTDLARKKGFRVENELTDEVTHIVAENLSRSEVLAWLKEHKMEKTKQFELLDISWLIESMKVGKPVDTKGKYQLAESVEVSANPDPTEGRVNELPPTMKTVSPYACQRRTTLNNRNQRFTDSLEILRENYELKGNDDTALEFRRAISVLKSLPFEVRSLKDTEGLPWISDEVKGIMEEIIEVGESREVQAVLNDEWYQSFHAFTRVFGVGVKTADKWYRMGLRTLEDVRSSKTLKLTPWQKVGLLYYEDLARGVTRAEADAIWLLVQDAVATFDPDAIVEIVGGFRRGKPQGHDVDLLISSPGAEKEQEDQLLQKVMNLWKKQGLLLCGRLEWSQWEDGGSPSGKADEGDAEASCFLILKLYDHLVRKSKRNMPTGSNMGESKPWKAIKVDLLRCPYGSFAFAMLQWTGSRMFRRDLRWYALEEKNMMLDNHSLYDRTRGIFLPAKSEEEIFEHLGLEYLEPFERNA

SEQ ID NO: 4357 - DNA, 1587 bp, synthetic construct
  misc_feature 1..1587: note = Variant of terminal deoxynucleotidyltransferase
  source 1..1587: mol_type = other DNA
atgcaccatcatcatcatcatggcggtagcggcagccacggcattcgtaccatcgattcggacttcgggaagaaacagcagaaaaaaggcgataaccacgatagttccgccacttatgaaatcaaatttcacgagtttgtgctgttcattctcgaagaaaaaatgggtgcgacgcgtcgtacttttctgacagatttagcccgcaagaaagggttccgcgtcgagaatgaactgaccgacgaagttacccacatcgtggcagaaaatctgtcacgctctgaagtattggcttggctgaaagaacacaagatggagaagaccaagcaattcgaactgctggatattagctggcttatcgaaagcatgaaagttggtaaaccggtggacaccaaggggaaataccagttggcggaatcggttgaggtgagtgcgaacccagatccgacagaaggtcgtgtaaacgagctgcctcctactatgaaaaccgtttctccgtatgcgtgtcaacgccgcaccaccctgaacaaccgtaatcaacgttttacggactcgctggagattcttcgtgaaaattacgagctgaaaggcaacgacgatactgcgctggaatttcgtcgtgctatctccgtgctgaaaagccttccgtttgaggtacgtagcctgaaagacacggaaggattgccctggatcagtgatgaagtcaaagggattatggaagaaatcatcgaagtcggggagtcgcgtgaagtgcaggccgtgctcaatgatgagtggtatcaaagcttccacgcatttacgcgtgtctttggagtgggggtgaagacagcagacaagtggtaccgtatgggtctgcgcaccctcgaggatgttcgttccagcaagaccctgaagttgaccccgtggcagaaagtaggtctgctgtattatgaagatcttgctcgcggcgttacgcgtgccgaagctgacgcgatttggctgctggttcaggatgcagtcgcaactttcgacccggatgcgatcgtggagattgtcggtggatttcgtcgtgggaaacctcagggtcacgacgttgatctgcttatcagttctccgggagctagtaaagagcaagaagaccaactcctgcagaaagtgatgaatctgtggaagaaacaagggttgttgctgtgtggtcgtctggaatggagtcagtgggaagatgggggttcgccttccggtaaggctgatgagggtgacgcggaggcgtcgtgctttctgatcctcaaactttatgatcatctggtgcgtaaaagtaaacgcaatatgccgactggttcgaacatgggcgagtccaaaccgtggaaagcaattaaagtagatctgctgcgttgccccgtcggcagttttgcgtttgcgatgttgcagtggaccggaagccgcatgttccgtcgtgatctgcgctggtacgccctggaagagaagaacatgatgctggacaatcattcgctgtatgacatgagtcgtggtatctttctccctgctaaatcggaagaggaaattttcgaacatctggggcttgaatacctggaaccgttcgaacgtaacgca

SEQ ID NO: 4358 - protein, 529 aa, synthetic construct
  REGION 1..529: note = Variant of terminal deoxynucleotidyltransferase
MHHHHHHGGSGSHGIRTIDSDFGKKQQKKGDNHDSSATYEIKFHEFVLFILEEKMGATRRTFLTDLARKKGFRVENELTDEVTHIVAENLSRSEVLAWLKEHKMEKTKQFELLDISWLIESMKVGKPVDTKGKYQLAESVEVSANPDPTEGRVNELPPTMKTVSPYACQRRTTLNNRNQRFTDSLEILRENYELKGNDDTALEFRRAISVLKSLPFEVRSLKDTEGLPWISDEVKGIMEEIIEVGESREVQAVLNDEWYQSFHAFTRVFGVGVKTADKWYRMGLRTLEDVRSSKTLKLTPWQKVGLLYYEDLARGVTRAEADAIWLLVQDAVATFDPDAIVEIVGGFRRGKPQGHDVDLLISSPGASKEQEDQLLQKVMNLWKKQGLLLCGRLEWSQWEDGGSPSGKADEGDAEASCFLILKLYDHLVRKSKRNMPTGSNMGESKPWKAIKVDLLRCPVGSFAFAMLQWTGSRMFRRDLRWYALEEKNMMLDNHSLYDMSRGIFLPAKSEEEIFEHLGLEYLEPFERNA

SEQ ID NO: 4359 - DNA, 1587 bp, synthetic construct
  misc_feature 1..1587: note = Variant of terminal deoxynucleotidyltransferase
  source 1..1587: mol_type = other DNA
atgcaccatcatcatcatcatggcggtagcggcagccacggcattcgtaccatcgattcggacttcgggaagaaacagcagaaaaaaggcgataaccacgatagttccgccacttatgaaatcaaatttcacgagtttgtgctgttcattctcgaagaaaaaatgggtgcgacgcgtcgtacttttctgacagatttagcccgcaagaaagggttccgcgtcgagaatgaactgaccgacgaagttacccacatcgtggcagaaaatctgtcacgctctgaagtattggcttggctgaaagaacacaagatggagaagaccaagcaattcgaactgctggatattagctggcttatcgaaagcatgaaagttggtaaaccggtggacaccaaggggaaataccagttggcggaatcggttgaggtgagtgcgaacccagatccgacagaaggtcgtgtaaacgagctgcctcctactatgaaaaccgtttctccgtatgcgtgtcaacgccgcaccaccctgaacaaccgtaatcaacgttttacggactcgctggagattcttcgtgaaaattacgagctgaaaggcaacgacgatactgcgctgaggtttcgtcgtgctatctccgtgctgaaaagccttccgtttgaggtacgtagcctgaaagacacggaaggattgccctggatcagtgatgaagtcaaagggattatggaagaaatcatcgaagtcggggagtcgcgtgaagtgcaggccgtgctcaatgatgagtggtatcaaagcttccacgcatttacgcgtgtctttggagtgggggtgaagacagcagacaagtggtaccgtatgggtctgcgcaccctcgaggatgttcgttccagcaagaccctgaagttgaccccgtggcagaaagtaggtctgctgtattatgaagatcttgctcgcggcgttacgcgtgccgaagctgacgcgatttggctgctggttcaggatgcagtcgcaactttcgacccggatgcgatcgtggagattgtcggtggatttcgtcgtgggaaacctcagggtcacgacgttgatctgcttatcagttctccgggagctgagaaagagcaagaagaccaactcctgcagaaagtgatgaatctgtggaagaaacaagggttgttgctgtgtggtcgtctggaatggagtcagtgggaagatgggggttcgccttccggtaaggctgatgagggtgacgcggaggcgtcgtgctttctgatcctcaaactttatgatcatctggtgcgtaaaagtaaacgcaatatgccgactggttcgaacatgggcgagtccaaaccgtggaaagcaattaaagtagatctgctgcgttgcccctatggcagttttgcgtttgcgatgttgcagtggaccggaagccgcatgttccgtcgtgatctgcgctggtacgccctggaagagaagaacatgatgctggacaatcattcgctgtatgacatgacccgcggtatcttcctccctgctaaatcggaagaggaaattttcgaacatctggggcttgaatacctggaaccgttcgaacgtaacgca

SEQ ID NO: 4360 - protein, 529 aa, synthetic construct
  REGION 1..529: note = Variant of terminal deoxynucleotidyltransferase
MHHHHHHGGSGSHGIRTIDSDFGKKQQKKGDNHDSSATYEIKFHEFVLFILEEKMGATRRTFLTDLARKKGFRVENELTDEVTHIVAENLSRSEVLAWLKEHKMEKTKQFELLDISWLIESMKVGKPVDTKGKYQLAESVEVSANPDPTEGRVNELPPTMKTVSPYACQRRTTLNNRNQRFTDSLEILRENYELKGNDDTALRFRRAISVLKSLPFEVRSLKDTEGLPWISDEVKGIMEEIIEVGESREVQAVLNDEWYQSFHAFTRVFGVGVKTADKWYRMGLRTLEDVRSSKTLKLTPWQKVGLLYYEDLARGVTRAEADAIWLLVQDAVATFDPDAIVEIVGGFRRGKPQGHDVDLLISSPGAEKEQEDQLLQKVMNLWKKQGLLLCGRLEWSQWEDGGSPSGKADEGDAEASCFLILKLYDHLVRKSKRNMPTGSNMGESKPWKAIKVDLLRCPYGSFAFAMLQWTGSRMFRRDLRWYALEEKNMMLDNHSLYDMTRGIFLPAKSEEEIFEHLGLEYLEPFERNA

SEQ ID NO: 4361 - DNA, 1587 bp, synthetic construct
  misc_feature 1..1587: note = Variant of terminal deoxynucleotidyltransferase
  source 1..1587: mol_type = other DNA
atgcaccatcatcatcatcatggcggtagcggcagccacggcattcgtaccatcgattcggacttcgggaagaaacagcagaaaaaaggcgataaccacgatagttccgccacttatgaaatcaaatttcacgagtttgtgctgttcattctcgaagaaaaaatgggtgcgacgcgtcgtacttttctgacagatttagcccgcaagaaagggttccgcgtcgagaatgaactgaccgacgaagttacccacatcgtggcagaaaatctgtcacgctctgaagtattggcttggctgaaagaacacaagatggagaagaccaagcaattcgaactgctggatattagctggcttatcgaaagcatgaaagttggtaaaccggtggacaccaaggggaaataccagttggcggaatcggttgaggtgagtgcgaacccagatccgacagaaggtcgtgtaaacgagctgcctcctactatgaaaaccgtttctccgtatgcgtgtcaacgccgcaccaccctgaacaaccgtaatcaacgttttacggactcgctggagattcttcgtgaaaattacgagctgaaaggcaacgacgatactgcgctggaatttcgtcgtgctatctccgtgctgaaaagccttccgtttgaggtacgtagcctgaaagacacggaaggattgccctggatcagtgatgaagtcaaagggattatggaagaaatcatcgaagtcggggagtcgcgtgaagtgcaggccgtgctcaatgatgagtggtatcaaagcttccacgcatttacgcgtgtctttggagtgggggtgaagacagcagacaagtggtaccgtatgggtctgcgcaccctcgaggatgttcgttccagcaagaccctgaagttgaccccgtggcagaaagtaggtctgctgtattatgaagatcttgctcgcggcgttacgcgtgccgaagctgacgcgatttggctgctggttcaggatgcagtcgcaactttcgacccggatgcgatcgtggagattgtcggtggatttcgtcgtgggaaacctcagggtcacgacgttgatctgcttatcagttctccgggagctgagaaagagcaagaagaccaactcctgcagaaagtgatgaatctgtggaagaaacaagggttgttgctgtgtggtcgtctggaaactagtcagtgggaagatgggaaatcgccttccggtaaggctgatgagggtgacgcggaggcgtcgtgctttctgatcctcaaactttatgatcatctggtgcgtaaaagtaaacgcaatatgccgactggttcgaacatgggcgagtccaaaccgtggaaagcaattaaagtagatctgctgcgttgcccctatggcagttttgcgtttgcgatgttgcagtggaccggaagccgcatgttccgtcgtgatctgcgccgctacgcccgtgaagagaagaacatgatgctggacaatcattcgctgtatgacatgacccgcggtatcttcctccctgctaaatcggaagaggaaattttcgaacatctggggcttgaatacctggaaccgttcgaacgtaacgca

SEQ ID NO: 4362 - protein, 529 aa, synthetic construct
  REGION 1..529: note = Variant of terminal deoxynucleotidyltransferase
MHHHHHHGGSGSHGIRTIDSDFGKKQQKKGDNHDSSATYEIKFHEFVLFILEEKMGATRRTFLTDLARKKGFRVENELTDEVTHIVAENLSRSEVLAWLKEHKMEKTKQFELLDISWLIESMKVGKPVDTKGKYQLAESVEVSANPDPTEGRVNELPPTMKTVSPYACQRRTTLNNRNQRFTDSLEILRENYELKGNDDTALEFRRAISVLKSLPFEVRSLKDTEGLPWISDEVKGIMEEIIEVGESREVQAVLNDEWYQSFHAFTRVFGVGVKTADKWYRMGLRTLEDVRSSKTLKLTPWQKVGLLYYEDLARGVTRAEADAIWLLVQDAVATFDPDAIVEIVGGFRRGKPQGHDVDLLISSPGAEKEQEDQLLQKVMNLWKKQGLLLCGRLETSQWEDGKSPSGKADEGDAEASCFLILKLYDHLVRKSKRNMPTGSNMGESKPWKAIKVDLLRCPYGSFAFAMLQWTGSRMFRRDLRRYAREEKNMMLDNHSLYDMTRGIFLPAKSEEEIFEHLGLEYLEPFERNA

SEQ ID NO: 4363 - DNA, 1587 bp, synthetic construct
  misc_feature 1..1587: note = Variant of terminal deoxynucleotidyltransferase
  source 1..1587: mol_type = other DNA
atgcaccatcatcatcatcatggcggtagcggcagccacggcattcgtaccatcgattcggacttcgggaagaaacagcagaaaaaaggcgataaccacgatagttccgccacttatgaaatcaaatttcacgagtttgtgctgttcattctcgaagaaaaaatgggtgcgacgcgtcgtacttttctgacagatttagcccgcaagaaagggttccgcgtcgagaatgaactgaccgacgaagttacccacatcgtggcagaaaatctgtcacgctctgaagtattggcttggctgaaagaacacaagatggagaagaccaagcaattcgaactgctggatattagctggcttatcgaaagcatgaaagttggtaaaccggtggacaccaaggggaaataccagttggcggaatcggttgaggtgagtgcgaacccagatccgacagaaggtcgtgtaaacgagctgcctcctactatgaaaaccgtttctccgtatgcgtgtcaacgccgcaccaccctgaacaaccgtaatcaacgttttacggactcgctggagattcttcgtgaaaattacgagctgaaaggcaacgacgatactgcgctgcgttttcgtcgtgctatctccgtgctgaaaagccttccgtttgaggtacgtagcctgaaagacacggaaggattgccctggatcagtgatgaagtcaaagggattatggaagaaatcatcgaagtcggggagtcgcgtgaagtgcaggccgtgctcaatgatgagtggtatcaaagcttccacgcatttacgcgtgtctttggagtgggggtgaagacagcagacaagtggtaccgtatgggtctgcgcaccctcgaggatgttcgttccagcaagaccctgaagttgaccccgtggcagaaagtaggtctgctgtattatgaagatcttgctcgcggcgttacgcgtgccgaagctgacgcgatttggctgctggttcaggatgcagtcgcaactttcgacccggatgcgatcgtggagattgtcggtggatttcgtcgtgggaaacctcagggtcacgacgttgatctgcttatcagttctccgggagctgaaaaagagcaagaagaccaactcctgcagaaagtgatgaatctgtggaagaaacaagggttgttgctgtgtggtcgtctggaatggagtcagtgggaatgggggggttcgccttccggtaaggctgatgagggtgacgcggaggcgtcgtgctttctgatcctcaaactttatgatcatctggtgcgtaaaagtaaacgcaatatgccgactggttcgaacatgggcgagtccaaaccgtggaaagcaattaaagtagatctgctgcgttgcccccgcggcagttttgcgtttgcgatgttgcagtggaccggaagccgcatgttccgtcgtgatctgcgctggtacgccctggaagagaagaacatgatgctggacaatcattcgctgtatgacatgactcctggtatctttctccctgctaaatcggaagaggaaattttcgaacatctggggcttgaatacctggaaccgttcgaacgtaacgca

SEQ ID NO: 4364 - protein, 529 aa, synthetic construct
  REGION 1..529: note = Variant of terminal deoxynucleotidyltransferase
MHHHHHHGGSGSHGIRTIDSDFGKKQQKKGDNHDSSATYEIKFHEFVLFILEEKMGATRRTFLTDLARKKGFRVENELTDEVTHIVAENLSRSEVLAWLKEHKMEKTKQFELLDISWLIESMKVGKPVDTKGKYQLAESVEVSANPDPTEGRVNELPPTMKTVSPYACQRRTTLNNRNQRFTDSLEILRENYELKGNDDTALRFRRAISVLKSLPFEVRSLKDTEGLPWISDEVKGIMEEIIEVGESREVQAVLNDEWYQSFHAFTRVFGVGVKTADKWYRMGLRTLEDVRSSKTLKLTPWQKVGLLYYEDLARGVTRAEADAIWLLVQDAVATFDPDAIVEIVGGFRRGKPQGHDVDLLISSPGAEKEQEDQLLQKVMNLWKKQGLLLCGRLEWSQWEWGGSPSGKADEGDAEASCFLILKLYDHLVRKSKRNMPTGSNMGESKPWKAIKVDLLRCPRGSFAFAMLQWTGSRMFRRDLRWYALEEKNMMLDNHSLYDMTPGIFLPAKSEEEIFEHLGLEYLEPFERNA

SEQ ID NO: 4365 - DNA, 1587 bp, synthetic construct
  misc_feature 1..1587: note = Variant of terminal deoxynucleotidyltransferase
  source 1..1587: mol_type = other DNA
atgcaccatcatcatcatcatggcggtagcggcagccacggcattcgtaccatcgattcggacttcgggaagaaacagcagaaaaaaggcgataaccacgatagttccgccacttatgaaatcaaatttcacgagtttgtgctgttcattctcgaagaaaaaatgggtgcgacgcgtcgtacttttctgacagatttagcccgcaagaaagggttccgcgtcgagaatgaactgaccgacgaagttacccacatcgtggcagaaaatctgtcacgctctgaagtattggcttggctgaaagaacacaagatggagaagaccaagcaattcgaactgctggatattagctggcttatcgaaagcatgaaagttggtaaaccggtggacaccaaggggaaataccagttggcggaatcggttgaggtgagtgcgaacccagatccgacagaaggtcgtgtaaacgagctgcctcctactatgaaaaccgtttctccgtatgcgtgtcaacgccgcaccaccctgaacaaccgtaatcaacgttttacggactcgctggagattcttcgtgaaaattacgagctgaaaggcaacgacgatactgcgctggaatttcgtcgtgctatctccgtgctgaaaagccttccgtttgaggtacgtagcctgaaagacacggaaggattgccctggatcagtgatgaagtcaaagggattatggaagaaatcatcgaagtcggggagtcgcgtgaagtgcaggccgtgctcaatgatgagtggtatcaaagcttccacgcatttacgcgtgtctttggagtgggggtgaagacagcagacaagtggtaccgtatgggtctgcgcaccctcgaggatgttcgttccagcaagaccctgaagttgaccccgtggcagaaagtaggtctgctgtattatgaagatcttgctcgcggcgttacgcgtgccgaagctgacgcgatttggctgctggttcaggatgcagtcgcaactttcgacccggatgcgatcgtggagattgtcggtggatttcgtcgtgggaaacctcagggtcacgacgttgatctgcttatcagttctccgggagctgagaaagagcaagaagaccaactcctgcagaaagtgatgaatctgtggaagaaacaagggttgttgctgtgtggtcgtctggaatggagtcagtgggaagatgggcggtcgccttccggtaaggctgatgagggtgacgcggaggcgtcgtgctttctgatcctcaaactttatgatcatctggtgcgtaaaagtaaacgcaatatgccgactggttcgaacatgggcgagtccaaaccgtggaaagcaattaaagtagatctgctgcgttgcccctatggcagttttgcgtttgcgatgttgcagtggaccggaagccgcatgttccgtcgtgatctgcgctggtacgccctggaagagaagaacatgatgctggacaatcattcgctgtatgacatgacccgcggtatcttcctccctgctaaatcggaagaggaaattttcgaacatctggggcttgaatacctggaaccgttcgaacgtaacgca

SEQ ID NO: 4366 - protein, 529 aa, synthetic construct
  REGION 1..529: note = Variant of terminal deoxynucleotidyltransferase
MHHHHHHGGSGSHGIRTIDSDFGKKQQKKGDNHDSSATYEIKFHEFVLFILEEKMGATRRTFLTDLARKKGFRVENELTDEVTHIVAENLSRSEVLAWLKEHKMEKTKQFELLDISWLIESMKVGKPVDTKGKYQLAESVEVSANPDPTEGRVNELPPTMKTVSPYACQRRTTLNNRNQRFTDSLEILRENYELKGNDDTALEFRRAISVLKSLPFEVRSLKDTEGLPWISDEVKGIMEEIIEVGESREVQAVLNDEWYQSFHAFTRVFGVGVKTADKWYRMGLRTLEDVRSSKTLKLTPWQKVGLLYYEDLARGVTRAEADAIWLLVQDAVATFDPDAIVEIVGGFRRGKPQGHDVDLLISSPGAEKEQEDQLLQKVMNLWKKQGLLLCGRLEWSQWEDGRSPSGKADEGDAEASCFLILKLYDHLVRKSKRNMPTGSNMGESKPWKAIKVDLLRCPYGSFAFAMLQWTGSRMFRRDLRWYALEEKNMMLDNHSLYDMTRGIFLPAKSEEEIFEHLGLEYLEPFERNA

SEQ ID NO: 4367 - DNA, 1587 bp, synthetic construct
  misc_feature 1..1587: note = Variant of terminal deoxynucleotidyltransferase
  source 1..1587: mol_type = other DNA
atgcaccatcatcatcatcatggcggtagcggcagccacggcattcgtaccatcgattcggacttcgggaagaaacagcagaaaaaaggcgataaccacgatagttccgccacttatgaaatcaaatttcacgagtttgtgctgttcattctcgaagaaaaaatgggtgcgacgcgtcgtacttttctgacagatttagcccgcaagaaagggttccgcgtcgagaatgaactgaccgacgaagttacccacatcgtggcagaaaatctgtcacgctctgaagtattggcttggctgaaagaacacaagatggagaagaccaagcaattcgaactgctggatattagctggcttatcgaaagcatgaaagttggtaaaccggtggacaccaaggggaaataccagttggcggaatcggttgaggtgagtgcgaacccagatccgacagaaggtcgtgtaaacgagctgcctcctactatgaaaaccgtttctccgtatgcgtgtcaacgccgcaccaccctgaacaaccgtaatcaacgttttacggactcgctggagattcttcgtgaaaattacgagctgaaaggcaacgacgatactgcgctggaatttcgtcgtgctatctccgtgctgaaaagccttccgtttgaggtacgtagcctgaaagacacggaaggattgccctggatcagtgatgaagtcaaagggattatggaagaaatcatcgaagtcggggagtcgcgtgaagtgcaggccgtgctcaatgatgagtggtatcaaagcttccacgcatttacgcgtgtctttggagtgggggtgaagacagcagacaagtggtaccgtatgggtctgcgcaccctcgaggatgttcgttccagcaagaccctgaagttgaccccgtggcagaaagtaggtctgctgtattatgaagatcttgctcgcggcgttacgcgtgccgaagctgacgcgatttggctgctggttcaggatgcagtcgcaactttcgacccggatgcgatcgtggagattgtcggtggatttcgtcgtgggaaacctcagggtcacgacgttgatctgcttatcagttctccgggagctgagaaagagcaagaagacgggctcctgcagaaagtgatgaatctgtggaagaaacaagggttgttgctgtgtggtcgtctggaatggagtcagtgggaagatgggggttcgccttccggtaaggctgatgagggtgacgcggaggcgtcgtgctttctgatcctcaaactttatgatcatctggtgcgtaaaagtaaacgcaatatgccgactggttcgaacatgggcgagtccaaaccgtggaaagcaattaaagtagatctgctgcgttgcccctatggcagttttgcgtttgcgatgttgcagtggaccggaagccgcatgttccgtcgtgatctgcgctggtacgccctggaagagaagaacatgatgctggacaatcattcgctgtatgacatgacccgcggtatcttcctccctgctaaatcggaagaggaaattttcgaacatctggggcttgaatacctggaaccgttcgaacgtaacgca

SEQ ID NO: 4368 - protein, 529 aa, synthetic construct
  REGION 1..529: note = Variant of terminal deoxynucleotidyltransferase
MHHHHHHGGSGSHGIRTIDSDFGKKQQKKGDNHDSSATYEIKFHEFVLFILEEKMGATRRTFLTDLARKKGFRVENELTDEVTHIVAENLSRSEVLAWLKEHKMEKTKQFELLDISWLIESMKVGKPVDTKGKYQLAESVEVSANPDPTEGRVNELPPTMKTVSPYACQRRTTLNNRNQRFTDSLEILRENYELKGNDDTALEFRRAISVLKSLPFEVRSLKDTEGLPWISDEVKGIMEEIIEVGESREVQAVLNDEWYQSFHAFTRVFGVGVKTADKWYRMGLRTLEDVRSSKTLKLTPWQKVGLLYYEDLARGVTRAEADAIWLLVQDAVATFDPDAIVEIVGGFRRGKPQGHDVDLLISSPGAEKEQEDGLLQKVMNLWKKQGLLLCGRLEWSQWEDGGSPSGKADEGDAEASCFLILKLYDHLVRKSKRNMPTGSNMGESKPWKAIKVDLLRCPYGSFAFAMLQWTGSRMFRRDLRWYALEEKNMMLDNHSLYDMTRGIFLPAKSEEEIFEHLGLEYLEPFERNA

SEQ ID NO: 4369 - DNA, 1587 bp, synthetic construct
  misc_feature 1..1587: note = Variant of terminal deoxynucleotidyltransferase
  source 1..1587: mol_type = other DNA
atgcaccatcatcatcatcatggcggtagcggcagccacggcattcgtaccatcgattcggacttcgggaagaaacagcagaaaaaaggcgataaccacgatagttccgccacttatgaaatcaaatttcacgagtttgtgctgttcattctcgaagaaaaaatgggtgcgacgcgtcgtacttttctgacagatttagcccgcaagaaagggttccgcgtcgagaatgaactgaccgacgaagttacccacatcgtggcagaaaatctgtcacgctctgaagtattggcttggctgaaagaacacaagatggagaagaccaagcaattcgaactgctggatattagctggcttatcgaaagcatgaaagttggtaaaccggtggacaccaaggggaaataccagttggcggaatcggttgaggtgagtgcgaacccagatccgacagaaggtcgtgtaaacgagctgcctcctactatgaaaaccgtttctccgtatgcgtgtcaacgccgcaccaccctgaacaaccgtaatcaacgttttacggactcgctggagattcttcgtgaaaattacgagctgaaaggcaacgacgatactgcgctggaatttcgtcgtgctatctccgtgctgaaaagccttccgtttgaggtacgtagcctgaaagacacggaaggattgccctggatcagtgatgaagtcaaagggattatggaagaaatcatcgaagtcggggagtcgcgtgaagtgcaggccgtgctcaatgatgagtggtatcaaagcttccacgcatttacgcgtgtctttggagtgggggtgaagacagcagacaagtggtaccgtatgggtctgcgcaccctcgaggatgttcgttccagcaagaccctgaagttgaccccgtggcagaaagtaggtctgctgtattatgaagatcttgctcgcggcgttacgcgtgccgaagctgacgcgatttggctgctggttcaggatgcagtcgcaactttcgacccggatgcgatcgtggagattgtcggtggatttcgtcgtgggaaacctcagggtcacgacgttgatctgcttatcagttctccgggagctgagaaagagcaagaagaccaactcctgcagaaagtgatgaatctgtggaagaaacaagggttgttgctgtgtggtcgtctggaatggagtcagtgggaagatgggggttcgccttccggtaaggctgatgagggtgacgcggaggcgtcgtgctttctgatcctcaaactttatgatcatctggtgcgtaaaagtaaacgcaatatgccgactggttcgaacatgggcgagtccaaaccgtggaaagcaattaaagtagatctgctgcgttgcccctatggcagttttgcgtttgcgatgttgcagtggaccggaagccgcatgttccgtcgtgatctgcgctggtacgccctgcaggagaagaacatgatgctggacaatcattcgctgtatgacatgacccgcggtatcttcctccctgctaaatcggaagaggaaattttcgaacatctggggcttgaatacctggaaccgttcgaacgtaacgca

SEQ ID NO: 4370 - protein, 529 aa, synthetic construct
  REGION 1..529: note = Variant of terminal deoxynucleotidyltransferase
MHHHHHHGGSGSHGIRTIDSDFGKKQQKKGDNHDSSATYEIKFHEFVLFILEEKMGATRRTFLTDLARKKGFRVENELTDEVTHIVAENLSRSEVLAWLKEHKMEKTKQFELLDISWLIESMKVGKPVDTKGKYQLAESVEVSANPDPTEGRVNELPPTMKTVSPYACQRRTTLNNRNQRFTDSLEILRENYELKGNDDTALEFRRAISVLKSLPFEVRSLKDTEGLPWISDEVKGIMEEIIEVGESREVQAVLNDEWYQSFHAFTRVFGVGVKTADKWYRMGLRTLEDVRSSKTLKLTPWQKVGLLYYEDLARGVTRAEADAIWLLVQDAVATFDPDAIVEIVGGFRRGKPQGHDVDLLISSPGAEKEQEDQLLQKVMNLWKKQGLLLCGRLEWSQWEDGGSPSGKADEGDAEASCFLILKLYDHLVRKSKRNMPTGSNMGESKPWKAIKVDLLRCPYGSFAFAMLQWTGSRMFRRDLRWYALQEKNMMLDNHSLYDMTRGIFLPAKSEEEIFEHLGLEYLEPFERNA

SEQ ID NO: 4371 - DNA, 1587 bp, synthetic construct
  misc_feature 1..1587: note = Variant of terminal deoxynucleotidyltransferase
  source 1..1587: mol_type = other DNA
atgcaccatcatcatcatcatggcggtagcggcagccacggcattcgtaccatcgattcggacttcgggaagaaacagcagaaaaaaggcgataaccacgatagttccgccacttatgaaatcaaatttcacgagtttgtgctgttcattctcgaagaaaaaatgggtgcgacgcgtcgtacttttctgacagatttagcccgcaagaaagggttccgcgtcgagaatgaactgaccgacgaagttacccacatcgtggcagaaaatctgtcacgctctgaagtattggcttggctgaaagaacacaagatggagaagaccaagcaattcgaactgctggatattagctggcttatcgaaagcatgaaagttggtaaaccggtggacaccaaggggaaataccagttggcggaatcggttgaggtgagtgcgaacccagatccgacagaaggtcgtgtaaacgagctgcctcctactatgaaaaccgtttctccgtatgcgtgtcaacgccgcaccaccctgaacaaccgtaatcaacgttttacggactcgctggagattcttcgtgaaaattacgagctgaaaggcaacgacgatactgcgctggaatttcgtcgtgctatctccgtgctgaaaagccttccgtttgaggtacgtagcctgaaagacacggaaggattgccctggatcagtgatgaagtcaaagggattatggaagaaatcatcgaagtcggggagtcgcgtgaagtgcaggccgtgctcaatgatgagtggtatcaaagcttccacgcatttacgcgtgtctttggagtgggggtgaagacagcagacaagtggtaccgtatgggtctgcgcaccctcgaggatgttcgttccagcaagaccctgaagttgaccccgtggcagaaagtaggtctgctgtattatgaagatcttgctcgcggcgttacgcgtgccgaagctgacgcgatttggctgctggttcaggatgcagtcgcaactttcgacccggatgcgatcgtggagattgtcggtggatttcgtcgtgggaaacctcagggtcacgacgttgatctgcttatcagttctccgggagctgagaaagagcaagaagaccaactcctgcagaaagtgatgaatctgtggaagaaacaagggttgttgctgtgtggtcgtctggaaaatagtcagtgggaagatgggggttcgccttccggtaaggctgatgagggtgacgcggaggcgtcgtgctttctgatcctcaaactttatgatcatctggtgcgtaaaagtaaacgcaatatgccgactggttcgaacatgggcgagtccaaaccgtggaaagcaattaaagtagatctgctgcgttgcccctatggcagttttgcgtttgcgatgttgcagtggaccggaagccgcatgttccgtcgtgatctgcgctggtacgccctggaagagaagaacatgatgctggacaatcattcgctgtatgacatgacccgcggtatcttcctccctgctaaatcggaagaggaaattttcgaacatctggggcttgaatacctggaaccgttcgaacgtaacgca

SEQ ID NO: 4372 - protein, 529 aa, synthetic construct
  REGION 1..529: note = Variant of terminal deoxynucleotidyltransferase
MHHHHHHGGSGSHGIRTIDSDFGKKQQKKGDNHDSSATYEIKFHEFVLFILEEKMGATRRTFLTDLARKKGFRVENELTDEVTHIVAENLSRSEVLAWLKEHKMEKTKQFELLDISWLIESMKVGKPVDTKGKYQLAESVEVSANPDPTEGRVNELPPTMKTVSPYACQRRTTLNNRNQRFTDSLEILRENYELKGNDDTALEFRRAISVLKSLPFEVRSLKDTEGLPWISDEVKGIMEEIIEVGESREVQAVLNDEWYQSFHAFTRVFGVGVKTADKWYRMGLRTLEDVRSSKTLKLTPWQKVGLLYYEDLARGVTRAEADAIWLLVQDAVATFDPDAIVEIVGGFRRGKPQGHDVDLLISSPGAEKEQEDQLLQKVMNLWKKQGLLLCGRLENSQWEDGGSPSGKADEGDAEASCFLILKLYDHLVRKSKRNMPTGSNMGESKPWKAIKVDLLRCPYGSFAFAMLQWTGSRMFRRDLRWYALEEKNMMLDNHSLYDMTRGIFLPAKSEEEIFEHLGLEYLEPFERNA

SEQ ID NO: 4373 - DNA, 1587 bp, synthetic construct
  misc_feature 1..1587: note = Variant of terminal deoxynucleotidyltransferase
  source 1..1587: mol_type = other DNA
atgcaccatcatcatcatcatggcggtagcggcagccacggcattcgtaccatcgattcggacttcgggaagaaacagcagaaaaaaggcgataaccacgatagttccgccacttatgaaatcaaatttcacgagtttgtgctgttcattctcgaagaaaaaatgggtgcgacgcgtcgtacttttctgacagatttagcccgcaagaaagggttccgcgtcgagaatgaactgaccgacgaagttacccacatcgtggcagaaaatctgtcacgctctgaagtattggcttggctgaaagaacacaagatggagaagaccaagcaattcgaactgctggatattagctggcttatcgaaagcatgaaagttggtaaaccggtggacaccaaggggaaataccagttggcggaatcggttgaggtgagtgcgaacccagatccgacagaaggtcgtgtaaacgagctgcctcctactatgaaaaccgtttctccgtatgcgtgtcaacgccgcaccaccctgaacaaccgtaatcaacgttttacggactcgctggagattcttcgtgaaaattacgagctgaaaggcaacgacgatactgcgctggaatttcgtcgtgctatctccgtgctgaaaagccttccgtttgaggtacgtagcctgaaagacacggaaggattgccctggatcagtgatgaagtcaaagggattatggaagaaatcatcgaagtcggggagtcgcgtgaagtgcaggccgtgctcaatgatgagtggtatcaaagcttccacgcatttacgcgtgtctttggagtgggggtgaagacagcagacaagtggtaccgtatgggtctgcgcaccctcgaggatgttcgttccagcaagaccctgaagttgaccccgtggcagaaagtaggtctgctgtattatgaagatcttgctcgcggcgttacgcgtgccgaagctgacgcgatttggctgctggttcaggatgcagtcgcaactttcgacccggatgcgatcgtggagattgtcggtggatttcgtcgtgggaaacctcagggtcacgacgttgatctgcttatcagttctccgggagctgagaaagagcaagaagaccaactcctgcagaaagtgatgaatctgtggaagaaacaagggttgttgctgtgtggtcgtctggaatggagtcagtgggaagatgggaaatcgccttccggtaaggctgatgagggtgacgcggaggcgtcgtgctttctgatcctcaaactttatgatcatctggtgcgtaaaagtaaacgcaatatgccgactggttcgaacatgggcgagtccaaaccgtggaaagcaattaaagtagatctgctgcgttgcccctatggcagttttgcgtttgcgatgttgcagtggaccggaagccgcatgttccgtcgtgatctgcgcgactacgccctggaagagaagaacatgatgctggacaatcattcgctgtatgacatgacccgcggtatcttcctccctgctaaatcggaagaggagattttcgaacatctggggcttgaatacctggaaccgttcgaacgtaacgca

SEQ ID NO: 4374 - protein, 529 aa, synthetic construct
  REGION 1..529: note = Variant of terminal deoxynucleotidyltransferase
MHHHHHHGGSGSHGIRTIDSDFGKKQQKKGDNHDSSATYEIKFHEFVLFILEEKMGATRRTFLTDLARKKGFRVENELTDEVTHIVAENLSRSEVLAWLKEHKMEKTKQFELLDISWLIESMKVGKPVDTKGKYQLAESVEVSANPDPTEGRVNELPPTMKTVSPYACQRRTTLNNRNQRFTDSLEILRENYELKGNDDTALEFRRAISVLKSLPFEVRSLKDTEGLPWISDEVKGIMEEIIEVGESREVQAVLNDEWYQSFHAFTRVFGVGVKTADKWYRMGLRTLEDVRSSKTLKLTPWQKVGLLYYEDLARGVTRAEADAIWLLVQDAVATFDPDAIVEIVGGFRRGKPQGHDVDLLISSPGAEKEQEDQLLQKVMNLWKKQGLLLCGRLEWSQWEDGKSPSGKADEGDAEASCFLILKLYDHLVRKSKRNMPTGSNMGESKPWKAIKVDLLRCPYGSFAFAMLQWTGSRMFRRDLRDYALEEKNMMLDNHSLYDMTRGIFLPAKSEEEIFEHLGLEYLEPFERNA

SEQ ID NO: 4375 - DNA, 1587 bp, synthetic construct
  misc_feature 1..1587: note = Variant of terminal deoxynucleotidyltransferase
  source 1..1587: mol_type = other DNA
atgcaccatcatcatcatcatggcggtagcggcagccacggcattcgtaccatcgattcggacttcgggaagaaacagcagaaaaaaggcgataaccacgatagttccgccacttatgaaatcaaatttcacgagtttgtgctgttcattctcgaagaaaaaatgggtgcgacgcgtcgtacttttctgacagatttagcccgcaagaaagggttccgcgtcgagaatgaactgaccgacgaagttacccacatcgtggcagaaaatctgtcacgctctgaagtattggcttggctgaaagaacacaagatggagaagaccaagcaattcgaactgctggatattagctggcttatcgaaagcatgaaagttggtaaaccggtggacaccaaggggaaataccagttggcggaatcggttgaggtgagtgcgaacccagatccgacagaaggtcgtgtaaacgagctgcctcctactatgaaaaccgtttctccgtatgcgtgtcaacgccgcaccaccctgaacaaccgtaatcaacgttttacggactcgctggagattcttcgtgaaaattacgagctgaaaggcaacgacgatactgcgctggaatttcgtcgtgctatctccgtgctgaaaagccttccgtttgaggtacgtagcctgaaagacacggaaggattgccctggatcagtgatgaagtcaaagggattatggaagaaatcatcgaagtcggggagtcgcgtgaagtgcaggccgtgctcaatgatgagtggtatcaaagcttccacgcatttacgcgtgtctttggagtgggggtgaagacagcagacaagtggtaccgtatgggtctgcgcaccctcgaggatgttcgttccagcaagaccctgaagttgaccccgtggcagaaagtaggtctgctgtattatgaagatcttgctcgcggcgttacgcgtgccgaagctgacgcgatttggctgctggttcaggatgcagtcgcaactttcgacccggatgcgatcgtggagattgtcggtggatttcgtcgtgggaaacctcagggtcacgacgttgatctgcttatcagttctccgggagctgaaaaagagcaagaagaccaactcctgcagaaagtgatgaatctgtggaagaaacaagggttgttgctgtgtggtcgtctggaatggagtcagtgggaatgggggggttcgccttccggtaaggctgatgagggtgacgcggaggcgtcgtgctttctgatcctcaaactttatgatcatctggtgcgtaaaagtaaacgcaatatgccgactggttcgaacatgggcgagtccaaaccgtggaaagcaattaaagtagatctgctgcgttgcccctacggcagttttgcgtttgcgatgttgcagtggaccggaagccgcatgttccgtcgtgatctgcgctggtacgccctggaagagaagaacatgatgctggacaatcattcgctgtatgacatgactcctggtatctttctccctgctaaatcggaagaggaaattttcgaacatctggggcttgaatacctggaaccgttcgaacgtaacgca

SEQ ID NO: 4376 - protein, 529 aa, synthetic construct
  REGION 1..529: note = Variant of terminal deoxynucleotidyltransferase
MHHHHHHGGSGSHGIRTIDSDFGKKQQKKGDNHDSSATYEIKFHEFVLFILEEKMGATRRTFLTDLARKKGFRVENELTDEVTHIVAENLSRSEVLAWLKEHKMEKTKQFELLDISWLIESMKVGKPVDTKGKYQLAESVEVSANPDPTEGRVNELPPTMKTVSPYACQRRTTLNNRNQRFTDSLEILRENYELKGNDDTALEFRRAISVLKSLPFEVRSLKDTEGLPWISDEVKGIMEEIIEVGESREVQAVLNDEWYQSFHAFTRVFGVGVKTADKWYRMGLRTLEDVRSSKTLKLTPWQKVGLLYYEDLARGVTRAEADAIWLLVQDAVATFDPDAIVEIVGGFRRGKPQGHDVDLLISSPGAEKEQEDQLLQKVMNLWKKQGLLLCGRLEWSQWEWGGSPSGKADEGDAEASCFLILKLYDHLVRKSKRNMPTGSNMGESKPWKAIKVDLLRCPYGSFAFAMLQWTGSRMFRRDLRWYALEEKNMMLDNHSLYDMTPGIFLPAKSEEEIFEHLGLEYLEPFERNA

SEQ ID NO: 4377 - DNA, 1587 bp, synthetic construct
  misc_feature 1..1587: note = Variant of terminal deoxynucleotidyltransferase
  source 1..1587: mol_type = other DNA
atgcaccatcatcatcatcatggcggtagcggcagccacggcattcgtaccatcgattcggacttcgggaagaaacagcagaaaaaaggcgataaccacgatagttccgccacttatgaaatcaaatttcacgagtttgtgctgttcattctcgaagaaaaaatgggtgcgacgcgtcgtacttttctgacagatttagcccgcaagaaagggttccgcgtcgagaatgaactgaccgacgaagttacccacatcgtggcagaaaatctgtcacgctctgaagtattggcttggctgaaagaacacaagatggagaagaccaagcaattcgaactgctggatattagctggcttatcgaaagcatgaaagttggtaaaccggtggacaccaaggggaaataccagttggcggaatcggttgaggtgagtgcgaacccagatccgacagaaggtcgtgtaaacgagctgcctcctactatgaaaaccgtttctccgtatgcgtgtcaacgccgcaccaccctgaacaaccgtaatcaacgttttacggactcgctggagattcttcgtgaaaattacgagctgaaaggcaacgacgatactgcgctggaatttcgtcgtgctatctccgtgctgaaaagccttccgtttgaggtacgtagcctgaaagacacggaaggattgccctggatcagtgatgaagtcaaagggattatggaagaaatcatcgaagtcggggagtcgcgtgaagtgcaggccgtgctcaatgatgagtggtatcaaagcttccacgcatttacgcgtgtctttggagtgggggtgaagacagcagacaagtggtaccgtatgggtctgcgcaccctcgaggatgttcgttccagcaagaccctgaagttgaccccgtggcagaaagtaggtctgctgtattatgaagatcttgctcgcggcgttacgcgtgccgaagctgacgcgatttggctgctggttcaggatgcagtcgcaactttcgacccggatgcgatcgtggagattgtcggtggatttcgtcgtgggaaacctcagggtcacgacgttgatctgcttatcagttctccgggagctgagaaagagcaagaagaccaactcctgagtaaagtgatgaatctgtggaagaaacaagggttgttgctgtgtggtcgtctggaatggagtcagtgggaagatgggggttcgccttccggtaaggctgatgagggtgacgcggaggcgtcgtgctttctgatcctcaaactttatgatcatctggtgcgtaaaagtaaacgcaatatgccgactggttcgaacatgggcgagtccaaaccgtggaaagcaattaaagtagatctgctgcgttgcccctatggcagttttgcgtttgcgatgttgcagtggaccggaagccgcatgttccgtcgtgatctgcgctggtacgccctggaagagaagaacatgatgctggacaatcattcgctgtatgacatgacccgcggtatcttcctccctgctaaatcggaagaggaaattttcgaacatctggggcttgaatacctggaaccgttcgaacgtaacgca

SEQ ID NO: 4378 - protein, 529 aa, synthetic construct
  REGION 1..529: note = Variant of terminal deoxynucleotidyltransferase
MHHHHHHGGSGSHGIRTIDSDFGKKQQKKGDNHDSSATYEIKFHEFVLFILEEKMGATRRTFLTDLARKKGFRVENELTDEVTHIVAENLSRSEVLAWLKEHKMEKTKQFELLDISWLIESMKVGKPVDTKGKYQLAESVEVSANPDPTEGRVNELPPTMKTVSPYACQRRTTLNNRNQRFTDSLEILRENYELKGNDDTALEFRRAISVLKSLPFEVRSLKDTEGLPWISDEVKGIMEEIIEVGESREVQAVLNDEWYQSFHAFTRVFGVGVKTADKWYRMGLRTLEDVRSSKTLKLTPWQKVGLLYYEDLARGVTRAEADAIWLLVQDAVATFDPDAIVEIVGGFRRGKPQGHDVDLLISSPGAEKEQEDQLLSKVMNLWKKQGLLLCGRLEWSQWEDGGSPSGKADEGDAEASCFLILKLYDHLVRKSKRNMPTGSNMGESKPWKAIKVDLLRCPYGSFAFAMLQWTGSRMFRRDLRWYALEEKNMMLDNHSLYDMTRGIFLPAKSEEEIFEHLGLEYLEPFERNA

SEQ ID NO: 4379 - DNA, 1587 bp, synthetic construct
  misc_feature 1..1587: note = Variant of terminal deoxynucleotidyltransferase
  source 1..1587: mol_type = other DNA
atgcaccatcatcatcatcatggcggtagcggcagccacggcattcgtaccatcgattcggacttcgggaagaaacagcagaaaaaaggcgataaccacgatagttccgccacttatgaaatcaaatttcacgagtttgtgctgttcattctcgaagaaaaaatgggtgcgacgcgtcgtacttttctgacagatttagcccgcaagaaagggttccgcgtcgagaatgaactgaccgacgaagttacccacatcgtggcagaaaatctgtcacgctctgaagtattggcttggctgaaagaacacaagatggagaagaccaagcaattcgaactgctggatattagctggcttatcgaaagcatgaaagttggtaaaccggtggacaccaaggggaaataccagttggcggaatcggttgaggtgagtgcgaacccagatccgacagaaggtcgtgtaaacgagctgcctcctactatgaaaaccgtttctccgtatgcgtgtcaacgccgcaccaccctgaacaaccgtaatcaacgttttacggactcgctggagattcttcgtgaaaattacgagctgaaaggcaacgacgatactgcgctggaatttcgtcgtgctatctccgtgctgaaaagccttccgtttgaggtacgtagcctgaaagacacggaaggattgccctggatcagtgatgaagtcaaagggattatggaagaaatcatcgaagtcggggagtcgcgtgaagtgcaggccgtgctcaatgatgagtggtatcaaagcttccacgcatttacgcgtgtctttggagtgggggtgaagacagcagacaagtggtaccgtatgggtctgcgcaccctcgaggatgttcgttccagcaagaccctgaagttgaccccgtggcagaaagtaggtctgctgtattatgaagatcttgctcgcggcgttacgcgtgccgaagctgacgcgatttggctgctggttcaggatgcagtcgcaactttcgacccggatgcgatcgtggagattgtcggtggatttcgtcgtgggaaacctcagggtcacgacgttgatctgcttatcagttctccgggagctgagaaagagcaagaagaccaactcctgcagaaagtgatgaatctgtggaagaaacaagggttgttgctgtgtggtcgtctggaatggagtcagtgggaagatgggggttcgccttccggtaaggctgatgagggtgacgcggaggcgtcgtgctttctgatcctcaaactttatgatcatctggtgcgtaaaagtaaacgcaatatgccgactggttcgaacatgggcgagtccaaaccgtggaaagcaattaaagtagatctgctgcgttgcccctatggcagttttgcgtttgcgatgttgcagtggaccggaagccgcatgttccgtcgtgatctgcgctggtacgccctggaagagaagaacatgatgctggacaatcattcgctgtatgacatgtcgcgcggtatcttcctccctgctaaatcggaagaggaaattttcgaacatctggggcttgaatacctggaaccgttcgaacgtaacgca

SEQ ID NO: 4380 - protein, 529 aa, synthetic construct
  REGION 1..529: note = Variant of terminal deoxynucleotidyltransferase
MHHHHHHGGSGSHGIRTIDSDFGKKQQKKGDNHDSSATYEIKFHEFVLFILEEKMGATRRTFLTDLARKKGFRVENELTDEVTHIVAENLSRSEVLAWLKEHKMEKTKQFELLDISWLIESMKVGKPVDTKGKYQLAESVEVSANPDPTEGRVNELPPTMKTVSPYACQRRTTLNNRNQRFTDSLEILRENYELKGNDDTALEFRRAISVLKSLPFEVRSLKDTEGLPWISDEVKGIMEEIIEVGESREVQAVLNDEWYQSFHAFTRVFGVGVKTADKWYRMGLRTLEDVRSSKTLKLTPWQKVGLLYYEDLARGVTRAEADAIWLLVQDAVATFDPDAIVEIVGGFRRGKPQGHDVDLLISSPGAEKEQEDQLLQKVMNLWKKQGLLLCGRLEWSQWEDGGSPSGKADEGDAEASCFLILKLYDHLVRKSKRNMPTGSNMGESKPWKAIKVDLLRCPYGSFAFAMLQWTGSRMFRRDLRWYALEEKNMMLDNHSLYDMSRGIFLPAKSEEEIFEHLGLEYLEPFERNA

SEQ ID NO: 4381 - DNA, 1587 bp, synthetic construct
  misc_feature 1..1587: note = Variant of terminal deoxynucleotidyltransferase
  source 1..1587: mol_type = other DNA
atgcaccatcatcatcatcatggcggtagcggcagccacggcattcgtaccatcgattcggacttcgggaagaaacagcagaaaaaaggcgataaccacgatagttccgccacttatgaaatcaaatttcacgagtttgtgctgttcattctcgaagaaaaaatgggtgcgacgcgtcgtacttttctgacagatttagcccgcaagaaagggttccgcgtcgagaatgaactgaccgacgaagttacccacatcgtggcagaaaatctgtcacgctctgaagtattggcttggctgaaagaacacaagatggagaagaccaagcaattcgaactgctggatattagctggcttatcgaaagcatgaaagttggtaaaccggtggacaccaaggggaaataccagttggcggaatcggttgaggtgagtgcgaacccagatccgacagaaggtcgtgtaaacgagctgcctcctactatgaaaaccgtttctccgtatgcgtgtcaacgccgcaccaccctgaacaaccgtaatcaacgttttacggactcgctggagattcttcgtgaaaattacgagctgaaaggcaacgacgatactgcgctgcgttttcgtcgtgctatctccgtgctgaaaagccttccgtttgaggtacgtagcctgaaagacacggaaggattgccctggatcagtgatgaagtcaaagggattatggaagaaatcatcgaagtcggggagtcgcgtgaagtgcaggccgtgctcaatgatgagtggtatcaaagcttccacgcatttacgcgtgtctttggagtgggggtgaagacagcagacaagtggtaccgtatgggtctgcgcaccctcgaggatgttcgttccagcaagaccctgaagttgaccccgtggcagaaagtaggtctgctgtattatgaagatcttgctcgcggcgttacgcgtgccgaagctgacgcgatttggctgctggttcaggatgcagtcgcaactttcgacccggatgcgatcgtggagattgtcggtggatttcgtcgtgggaaacctcagggtcacgacgttgatctgcttatcagttctccgggagctagtaaagagcaagaagaccaactcctgcagaaagtgatgaatctgtggaagaaacaagggttgttgctgtgtggtcgtctggaatggagtcagtgggaagacgggggttcgccttccggtaaggctgatgagggtgacgcggaggcgtcgtgctttctgatcctcaaactttatgatcatctggtgcgtaaaagtaaacgcaatatgccgactggttcgaacatgggcgagtccaaaccgtggaaagcaattaaagtagatctgctgcgttgccccgtcggcagttttgcgtttgcgatgttgcagtggaccggaagccgcatgttccgtcgtgatctgcgctggtacgccctggaagagaagaacatgatgctggacaatcattcgctgtatgacatgagtcctggtatctttctccctgctaaatcggaagaggaaattttcgaacatctggggcttgaatacctggaaccgttcgaacgtaacgca

SEQ ID NO: 4382 - protein, 529 aa, synthetic construct
  REGION 1..529: note = Variant of terminal deoxynucleotidyltransferase
MHHHHHHGGSGSHGIRTIDSDFGKKQQKKGDNHDSSATYEIKFHEFVLFILEEKMGATRRTFLTDLARKKGFRVENELTDEVTHIVAENLSRSEVLAWLKEHKMEKTKQFELLDISWLIESMKVGKPVDTKGKYQLAESVEVSANPDPTEGRVNELPPTMKTVSPYACQRRTTLNNRNQRFTDSLEILRENYELKGNDDTALRFRRAISVLKSLPFEVRSLKDTEGLPWISDEVKGIMEEIIEVGESREVQAVLNDEWYQSFHAFTRVFGVGVKTADKWYRMGLRTLEDVRSSKTLKLTPWQKVGLLYYEDLARGVTRAEADAIWLLVQDAVATFDPDAIVEIVGGFRRGKPQGHDVDLLISSPGASKEQEDQLLQKVMNLWKKQGLLLCGRLEWSQWEDGGSPSGKADEGDAEASCFLILKLYDHLVRKSKRNMPTGSNMGESKPWKAIKVDLLRCPVGSFAFAMLQWTGSRMFRRDLRWYALEEKNMMLDNHSLYDMSPGIFLPAKSEEEIFEHLGLEYLEPFERNA

SEQ ID NO: 4383 - DNA, 1587 bp, synthetic construct
  misc_feature 1..1587: note = Variant of terminal deoxynucleotidyltransferase
  source 1..1587: mol_type = other DNA
atgcaccatcatcatcatcatggcggtagcggcagccacggcattcgtaccatcgattcggacttcgggaagaaacagcagaaaaaaggcgataaccacgatagttccgccacttatgaaatcaaatttcacgagtttgtgctgttcattctcgaagaaaaaatgggtgcgacgcgtcgtacttttctgacagatttagcccgcaagaaagggttccgcgtcgagaatgaactgaccgacgaagttacccacatcgtggcagaaaatctgtcacgctctgaagtattggcttggctgaaagaacacaagatggagaagaccaagcaattcgaactgctggatattagctggcttatcgaaagcatgaaagttggtaaaccggtggacaccaaggggaaataccagttggcggaatcggttgaggtgagtgcgaacccagatccgacagaaggtcgtgtaaacgagctgcctcctactatgaaaaccgtttctccgtatgcgtgtcaacgccgcaccaccctgaacaaccgtaatcaacgttttacggactcgctggagattcttcgtgaaaattacgagctgaaaggcaacgacgatactgcgctggaatttcgtcgtgctatctccgtgctgaaaagccttccgtttgaggtacgtagcctgaaagacacggaaggattgccctggatcagtgatgaagtcaaagggattatggaagaaatcatcgaagtcggggagtcgcgtgaagtgcaggccgtgctcaatgatgagtggtatcaaagcttccacgcatttacgcgtgtctttggagtgggggtgaagacagcagacaagtggtaccgtatgggtctgcgcaccctcgaggatgttcgttccagcaagaccctgaagttgaccccgtggcagaaagtaggtctgctgtattatgaagatcttgctcgcggcgttacgcgtgccgaagctgacgcgatttggctgctggttcaggatgcagtcgcaactttcgacccggatgcgatcgtggagattgtcggtggatttcgtcgtgggaaacctcagggtcacgacgttgatctgcttatcagttctccgggagctgagaaagagcaagaagaccaactcctgcagaaagtgatgaatctgtggaagaaacaagggttgttgctgtgtggtcgtctggaatggagtcagtgggaagatgggggttcgccttccggtaaggctgatgagggtgacgcggaggcgtcgtgctttctgatcctcaaactttatgatcatctggtgcgtaaaagtaaacgcaatatgccgactggttcgaacatgggcgagtccaaaccgtggaaagcaattaaagtagatctgctgcgttgccggtatggcagttttgcgtttgcgatgttgcagtggaccggaagccgcatgttccgtcgtgatctgcgctggtacgccctggaagagaagaacatgatgctggacaatcattcgctgtatgacatgacccgcggtatcttcctccctgctaaatcggaagaggaaattttcgaacatctggggcttgaatacctggaaccgttcgaacgtaacgca

SEQ ID NO: 4384 - protein, 529 aa, synthetic construct
  REGION 1..529: note = Variant of terminal deoxynucleotidyltransferase
MHHHHHHGGSGSHGIRTIDSDFGKKQQKKGDNHDSSATYEIKFHEFVLFILEEKMGATRRTFLTDLARKKGFRVENELTDEVTHIVAENLSRSEVLAWLKEHKMEKTKQFELLDISWLIESMKVGKPVDTKGKYQLAESVEVSANPDPTEGRVNELPPTMKTVSPYACQRRTTLNNRNQRFTDSLEILRENYELKGNDDTALEFRRAISVLKSLPFEVRSLKDTEGLPWISDEVKGIMEEIIEVGESREVQAVLNDEWYQSFHAFTRVFGVGVKTADKWYRMGLRTLEDVRSSKTLKLTPWQKVGLLYYEDLARGVTRAEADAIWLLVQDAVATFDPDAIVEIVGGFRRGKPQGHDVDLLISSPGAEKEQEDQLLQKVMNLWKKQGLLLCGRLEWSQWEDGGSPSGKADEGDAEASCFLILKLYDHLVRKSKRNMPTGSNMGESKPWKAIKVDLLRCRYGSFAFAMLQWTGSRMFRRDLRWYALEEKNMMLDNHSLYDMTRGIFLPAKSEEEIFEHLGLEYLEPFERNA

SEQ ID NO: 4385 - DNA, 1587 bp, synthetic construct
  misc_feature 1..1587: note = Variant of terminal deoxynucleotidyltransferase
  source 1..1587: mol_type = other DNA
atgcaccatcatcatcatcatggcggtagcggcagccacggcattcgtaccatcgattcggacttcgggaagaaacagcagaaaaaaggcgataaccacgatagttccgccacttatgaaatcaaatttcacgagtttgtgctgttcattctcgaagaaaaaatgggtgcgacgcgtcgtacttttctgacagatttagcccgcaagaaagggttccgcgtcgagaatgaactgaccgacgaagttacccacatcgtggcagaaaatctgtcacgctctgaagtattggcttggctgaaagaacacaagatggagaagaccaagcaattcgaactgctggatattagctggcttatcgaaagcatgaaagttggtaaaccggtggacaccaaggggaaataccagttggcggaatcggttgaggtgagtgcgaacccagatccgacagaaggtcgtgtaaacgagctgcctcctactatgaaaaccgtttctccgtatgcgtgtcaacgccgcaccaccctgaacaaccgtaatcaacgttttacggactcgctggagattcttcgtgaaaattacgagctgaaaggcaacgacgatactgcgctggaatttcgtcgtgctatctccgtgctgaaaagccttccgtttgaggtacgtagcctgaaagacacggaaggattgccctggatcagtgatgaagtcaaagggattatggaagaaatcatcgaagtcggggagtcgcgtgaagtgcaggccgtgctcaatgatgagtggtatcaaagcttccacgcatttacgcgtgtctttggagtgggggtgaagacagcagacaagtggtaccgtatgggtctgcgcaccctcgaggatgttcgttccagcaagaccctgaagttgaccccgtggcagaaagtaggtctgctgtattatgaagatcttgctcgcggcgttacgcgtgccgaagctgacgcgatttggctgctggttcaggatgcagtcgcaactgtcgacccggatgcgatcgtggagattgtcggtggatttcgtcgtgggaaacctcagggtcacgacgttgatctgcttatcagttctccgggagctgagaaagagcaagaagaccaactcctgcagaaagtgatgaatctgtggaagaaacaagggttgttgctgtgtggtcgtctggaatggagtcagtgggaagatgggggctcgccttccggtaaggctgatgagggtgacgcggaggcgtcgtgctttctgatcctcaaactttatgatcatctggtgcgtaaaagtaaacgcaatatgccgactggttcgaacatgggcgagtccaaaccgtggaaagcaattaaagtagatctgctgcgttgcccctatggcagttttgcgtttgcgatgttgcagtggaccggaagccgcatgttccgtcgtgatctgcgcgactacgcccgtgaagagaagaacatgatgctggacaaccattcgctgtatgacatgacccgcggtatcttcctccctgctaaatcggaagaggagattttcgaacatctggggcttgaatacctggaaccgttcgaacgtaacgca

SEQ ID NO: 4386 - protein, 529 aa, synthetic construct
  REGION 1..529: note = Variant of terminal deoxynucleotidyltransferase
MHHHHHHGGSGSHGIRTIDSDFGKKQQKKGDNHDSSATYEIKFHEFVLFILEEKMGATRRTFLTDLARKKGFRVENELTDEVTHIVAENLSRSEVLAWLKEHKMEKTKQFELLDISWLIESMKVGKPVDTKGKYQLAESVEVSANPDPTEGRVNELPPTMKTVSPYACQRRTTLNNRNQRFTDSLEILRENYELKGNDDTALEFRRAISVLKSLPFEVRSLKDTEGLPWISDEVKGIMEEIIEVGESREVQAVLNDEWYQSFHAFTRVFGVGVKTADKWYRMGLRTLEDVRSSKTLKLTPWQKVGLLYYEDLARGVTRAEADAIWLLVQDAVATVDPDAIVEIVGGFRRGKPQGHDVDLLISSPGAEKEQEDQLLQKVMNLWKKQGLLLCGRLEWSQWEDGGSPSGKADEGDAEASCFLILKLYDHLVRKSKRNMPTGSNMGESKPWKAIKVDLLRCPYGSFAFAMLQWTGSRMFRRDLRDYAREEKNMMLDNHSLYDMTRGIFLPAKSEEEIFEHLGLEYLEPFERNA

SEQ ID NO: 4387 - DNA, 1587 bp, synthetic construct
  misc_feature 1..1587: note = Variant of terminal deoxynucleotidyltransferase
  source 1..1587: mol_type = other DNA
atgcaccatcatcatcatcatggcggtagcggcagccacggcattcgtaccatcgattcggacttcgggaagaaacagcagaaaaaaggcgataaccacgatagttccgccacttatgaaatcaaatttcacgagtttgtgctgttcattctcgaagaaaaaatgggtgcgacgcgtcgtacttttctgacagatttagcccgcaagaaagggttccgcgtcgagaatgaactgaccgacgaagttacccacatcgtggcagaaaatctgtcacgctctgaagtattggcttggctgaaagaacacaagatggagaagaccaagcaattcgaactgctggatattagctggcttatcgaaagcatgaaagttggtaaaccggtggacaccaaggggaaataccagttggcggaatcggttgaggtgagtgcgaacccagatccgacagaaggtcgtgtaaacgagctgcctcctactatgaaaaccgtttctccgtatgcgtgtcaacgccgcaccaccctgaacaaccgtaatcaacgttttacggactcgctggagattcttcgtgaaaattacgagctgaaaggcaacgacgatactgcgctggaatttcgtcgtgctatctccgtgctgaaaagccttccgtttgaggtacgtagcctgaaagacacggaaggattgccctggatcagtgatgaagtcaaagggattatggaagaaatcatcgaagtcggggagtcgcgtgaagtgcaggccgtgctcaatgatgagtggtatcaaagcttccacgcatttacgcgtgtctttggagtgggggtgaagacagcagacaagtggtaccgtatgggtctgcgcaccctcgaggatgttcgttccagcaagaccctgaagttgaccccgtggcagaaagtaggtctgctgtattatgaagatcttgctcgcggcgttacgcgtgccgaagctgacgcgatttggctgctggttcaggatgcagtcgcaactttcgacccggatgcgatcgtggagattgtcggtggatttcgtcgtgggaaacctcagggtcacgacgttgatctgcttatcagttctccgggagctgagaaagagcaagaagaccaactcctgcagaaagtgatgaatctgtggaagaaacaagggttgttgctgtgtggtcgtctggaatggagtcagtgggaagatgggggttcgccttccggtaaggctgatgagggtgacgcggaggcgtcgtgctttctgatcctcaaactttatgatcatctggtgcgtaaaagtaaacgcaatatgccgactggttcgaacatgggcgagtccaaaccgtggaaagcaattaaagtagatctgctgcgttgcccctatatgagttttgcgtttgcgatgttgcagtggaccggaagccgcatgttccgtcgtgatctgcgctggtacgccctggaagagaagaacatgatgctggacaatcattcgctgtatgacatgacccgcggtatcttcctccctgctaaatcggaagaggaaattttcgaacatctggggcttgaatacctggaaccgttcgaacgtaacgca

SEQ ID NO: 4388 - protein, 529 aa, synthetic construct
  REGION 1..529: note = Variant of terminal deoxynucleotidyltransferase
MHHHHHHGGSGSHGIRTIDSDFGKKQQKKGDNHDSSATYEIKFHEFVLFILEEKMGATRRTFLTDLARKKGFRVENELTDEVTHIVAENLSRSEVLAWLKEHKMEKTKQFELLDISWLIESMKVGKPVDTKGKYQLAESVEVSANPDPTEGRVNELPPTMKTVSPYACQRRTTLNNRNQRFTDSLEILRENYELKGNDDTALEFRRAISVLKSLPFEVRSLKDTEGLPWISDEVKGIMEEIIEVGESREVQAVLNDEWYQSFHAFTRVFGVGVKTADKWYRMGLRTLEDVRSSKTLKLTPWQKVGLLYYEDLARGVTRAEADAIWLLVQDAVATFDPDAIVEIVGGFRRGKPQGHDVDLLISSPGAEKEQEDQLLQKVMNLWKKQGLLLCGRLEWSQWEDGGSPSGKADEGDAEASCFLILKLYDHLVRKSKRNMPTGSNMGESKPWKAIKVDLLRCPYMSFAFAMLQWTGSRMFRRDLRWYALEEKNMMLDNHSLYDMTRGIFLPAKSEEEIFEHLGLEYLEPFERNA

SEQ ID NO: 4389 - DNA, 1587 bp, synthetic construct
  misc_feature 1..1587: note = Variant of terminal deoxynucleotidyltransferase
  source 1..1587: mol_type = other DNA
atgcaccatcatcatcatcatggcggtagcggcagccacggcattcgtaccatcgattcggacttcgggaagaaacagcagaaaaaaggcgataaccacgatagttccgccacttatgaaatcaaatttcacgagtttgtgctgttcattctcgaagaaaaaatgggtgcgacgcgtcgtacttttctgacagatttagcccgcaagaaagggttccgcgtcgagaatgaactgaccgacgaagttacccacatcgtggcagaaaatctgtcacgctctgaagtattggcttggctgaaagaacacaagatggagaagaccaagcaattcgaactgctggatattagctggcttatcgaaagcatgaaagttggtaaaccggtggacaccaaggggaaataccagttggcggaatcggttgaggtgagtgcgaacccagatccgacagaaggtcgtgtaaacgagctgcctcctactatgaaaaccgtttctccgtatgcgtgtcaacgccgcaccaccctgaacaaccgtaatcaacgttttacggactcgctggagattcttcgtgaaaattacgagctgaaaggcaacgacgatactgcgctggaatttcgtcgtgctatctccgtgctgaaaagccttccgtttgaggtacgtagcctgaaagacacggaaggattgccctggatcagtgatgaagtcaaagggattatggaagaaatcatcgaagtcggggagtcgcgtgaagtgcaggccgtgctcaatgatgagtggtatcaaagcttccacgcatttacgcgtgtctttggagtgggggtgaagacagcagacaagtggtaccgtatgggtctgcgcaccctcgaggatgttcgttccagcaagaccctgaagttgaccccgtggcagaaagtaggtctgctgtattatgaagatcttgctcgcggcgttacgcgtgccgaagctgacgcgatttggctgctggttcaggatgcagtcgcaactttccagccggatgcgatcgtggagattgtcggtggatttcgtcgtgggaaacctcagggtcacgacgttgatctgcttatcagttctccgggagctgagaaagagcaagaagaccaactcctgcagaaagtgatgaatctgtggaagaaacaagggttgttgctgtgtggtcgtctggaatggagtcagtgggaagatgggggttcgccttccggtaaggctgatgagggtgacgcggaggcgtcgtgctttctgatcctcaaactttatgatcatctggtgcgtaaaagtaaacgcaatatgccgactggttcgaacatgggcgagtccaaaccgtggaaagcaattaaagtagatctgctgcgttgcccctatggcagttttgcgtttgcgatgttgcagtggaccggaagccgcatgttccgtcgtgatctgcgctggtacgccctggaagagaagaacatgatgctggacaatcattcgctgtatgacatgacccgcggtatcttcctccctgctaaatcggaagaggaaattttcgaacatctggggcttgaatacctggaaccgttcgaacgtaacgca

SEQ ID NO: 4390 - protein, 529 aa, synthetic construct
  REGION 1..529: note = Variant of terminal deoxynucleotidyltransferase
MHHHHHHGGSGSHGIRTIDSDFGKKQQKKGDNHDSSATYEIKFHEFVLFILEEKMGATRRTFLTDLARKKGFRVENELTDEVTHIVAENLSRSEVLAWLKEHKMEKTKQFELLDISWLIESMKVGKPVDTKGKYQLAESVEVSANPDPTEGRVNELPPTMKTVSPYACQRRTTLNNRNQRFTDSLEILRENYELKGNDDTALEFRRAISVLKSLPFEVRSLKDTEGLPWISDEVKGIMEEIIEVGESREVQAVLNDEWYQSFHAFTRVFGVGVKTADKWYRMGLRTLEDVRSSKTLKLTPWQKVGLLYYEDLARGVTRAEADAIWLLVQDAVATFQPDAIVEIVGGFRRGKPQGHDVDLLISSPGAEKEQEDQLLQKVMNLWKKQGLLLCGRLEWSQWEDGGSPSGKADEGDAEASCFLILKLYDHLVRKSKRNMPTGSNMGESKPWKAIKVDLLRCPYGSFAFAMLQWTGSRMFRRDLRWYALEEKNMMLDNHSLYDMTRGIFLPAKSEEEIFEHLGLEYLEPFERNA

SEQ ID NO: 4391 - DNA, 1587 bp, synthetic construct
  misc_feature 1..1587: note = Variant of terminal deoxynucleotidyltransferase
  source 1..1587: mol_type = other DNA
atgcaccatcatcatcatcatggcggtagcggcagccacggcattcgtaccatcgattcggacttcgggaagaaacagcagaaaaaaggcgataaccacgatagttccgccacttatgaaatcaaatttcacgagtttgtgctgttcattctcgaagaaaaaatgggtgcgacgcgtcgtacttttctgacagatttagcccgcaagaaagggttccgcgtcgagaatgaactgaccgacgaagttacccacatcgtggcagaaaatctgtcacgctctgaagtattggcttggctgaaagaacacaagatggagaagaccaagcaattcgaactgctggatattagctggcttatcgaaagcatgaaagttggtaaaccggtggacaccaaggggaaataccagttggcggaatcggttgaggtgagtgcgaacccagatccgacagaaggtcgtgtaaacgagctgcctcctactatgaaaaccgtttctccgtatgcgtgtcaacgccgcaccaccctgaacaaccgtaatcaacgttttacggactcgctggagattcttcgtgaaaattacgagctgaaaggcaacgacgatactgcgctggaatttcgtcgtgctatctccgtgctgaaaagccttccgtttgaggtacgtagcctgaaagacacggaaggattgccctggatcagtgatgaagtcaaagggattatggaagaaatcatcgaagtcggggagtcgcgtgaagtgcaggccgtgctcaatgatgagtggtatcaaagcttccacgcatttacgcgtgtctttggagtgggggtgaagacagcagacaagtggtaccgtatgggtctgcgcaccctcgaggatgttcgttccagcaagaccctgaagttgaccccgtggcagaaagtaggtctgctgtattatgaagatcttgctcgcggcgttacgcgtgccgaagctgacgcgatttggctgctggttcaggatgcagtcgcaactttcgacccggatgcgatcgtggagattgtcggtggatttcgtcgtgggaaacctcagggtcacgacgttgatctgcttatcagttctccgggagctacgaaagagcaagaagaccaactcctgcagaaagtgatgaatctgtggaagaaacaagggttgttgctgtgtggtcgtctggaatggagtcagtgggaagatgggggttcgccttccggtaaggctgatgagggtgacgcggaggcgtcgtgctttctgatcctcaaactttatgatcatctggtgcgtaaaagtaaacgcaatatgccgactggttcgaacatgggcgagtccaaaccgtggaaagcaattaaagtagatctgctgcgttgcccctatggcagttttgcgtttgcgatgttgcagtggaccggaagccgcatgttccgtcgtgatctgcgctggtacgccctggaagagaagaacatgatgctggacaatcattcgctgtatgacatgacccgcggtatcttcctccctgctaaatcggaagaggaaattttcgaacatctggggcttgaatacctggaaccgttcgaacgtaacgca

SEQ ID NO: 4392 - protein, 529 aa, synthetic construct
  REGION 1..529: note = Variant of terminal deoxynucleotidyltransferase
MHHHHHHGGSGSHGIRTIDSDFGKKQQKKGDNHDSSATYEIKFHEFVLFILEEKMGATRRTFLTDLARKKGFRVENELTDEVTHIVAENLSRSEVLAWLKEHKMEKTKQFELLDISWLIESMKVGKPVDTKGKYQLAESVEVSANPDPTEGRVNELPPTMKTVSPYACQRRTTLNNRNQRFTDSLEILRENYELKGNDDTALEFRRAISVLKSLPFEVRSLKDTEGLPWISDEVKGIMEEIIEVGESREVQAVLNDEWYQSFHAFTRVFGVGVKTADKWYRMGLRTLEDVRSSKTLKLTPWQKVGLLYYEDLARGVTRAEADAIWLLVQDAVATFDPDAIVEIVGGFRRGKPQGHDVDLLISSPGATKEQEDQLLQKVMNLWKKQGLLLCGRLEWSQWEDGGSPSGKADEGDAEASCFLILKLYDHLVRKSKRNMPTGSNMGESKPWKAIKVDLLRCPYGSFAFAMLQWTGSRMFRRDLRWYALEEKNMMLDNHSLYDMTRGIFLPAKSEEEIFEHLGLEYLEPFERNA

SEQ ID NO: 4393 - DNA, 1587 bp, synthetic construct
  misc_feature 1..1587: note = Variant of terminal deoxynucleotidyltransferase
  source 1..1587: mol_type = other DNA
atgcaccatcatcatcatcatggcggtagcggcagccacggcattcgtaccatcgattcggacttcgggaagaaacagcagaaaaaaggcgataaccacgatagttccgccacttatgaaatcaaatttcacgagtttgtgctgttcattctcgaagaaaaaatgggtgcgacgcgtcgtacttttctgacagatttagcccgcaagaaagggttccgcgtcgagaatgaactgaccgacgaagttacccacatcgtggcagaaaatctgtcacgctctgaagtattggcttggctgaaagaacacaagatggagaagaccaagcaattcgaactgctggatattagctggcttatcgaaagcatgaaagttggtaaaccggtggacaccaaggggaaataccagttggcggaatcggttgaggtgagtgcgaacccagatccgacagaaggtcgtgtaaacgagctgcctcctactatgaaaaccgtttctccgtatgcgtgtcaacgccgcaccaccctgaacaaccgtaatcaacgttttacggactcgctggagattcttcgtgaaaattacgagctgaaaggcaacgacgatactgcgctggaatttcgtcgtgctatctccgtgctgaaaagccttccgtttgaggtacgtagcctgaaagacacggaaggattgccctggatcagtgatgaagtcaaagggattatggaagaaatcatcgaagtcggggagtcgcgtgaagtgcaggccgtgctcaatgatgagtggtatcaaagcttccacgcatttacgcgtgtctttggagtgggggtgaagacagcagacaagtggtaccgtatgggtctgcgcaccctcgaggatgttcgttccagcaagaccctgaagttgaccccgtggcagaaagtaggtctgctgtattatgaagatcttgctcgcggcgttacgcgtgccgaagctgacgcgatttggctgctggttcaggatgcagtcgcaactttcgacccggatgcgatcgtggagattgtcggtggatttcgtcgtgggaaacctcagggtcacgacgttgatctgcttatcagttctccgggagctgagaaagagcaagaagaccaactcctgcagaaagtgatgaatctgtggaagaaacaagggttgttgctgtgtggtcgtctggaatggagtcagtgggaagatgggggttcgccttccggtaaggctgatgagggtgacgcggaggcgtcgtgctttctgatcctcaaactttatgatcatctggtgcgtaaaagtaaacgcaatatgccgactggttcgaacatgggcgagtccaaaccgtggaaagcaattaaagtagatctgctgcgttgcccctatcgtagttttgcgtttgcgatgttgcagtggaccggaagccgcatgttccgtcgtgatctgcgctggtacgccctggaagagaagaacatgatgctggacaatcattcgctgtatgacatgacccgcggtatcttcctccctgctaaatcggaagaggaaattttcgaacatctggggcttgaatacctggaaccgttcgaacgtaacgca

SEQ ID NO: 4394 - protein, 529 aa, synthetic construct
  REGION 1..529: note = Variant of terminal deoxynucleotidyltransferase
MHHHHHHGGSGSHGIRTIDSDFGKKQQKKGDNHDSSATYEIKFHEFVLFILEEKMGATRRTFLTDLARKKGFRVENELTDEVTHIVAENLSRSEVLAWLKEHKMEKTKQFELLDISWLIESMKVGKPVDTKGKYQLAESVEVSANPDPTEGRVNELPPTMKTVSPYACQRRTTLNNRNQRFTDSLEILRENYELKGNDDTALEFRRAISVLKSLPFEVRSLKDTEGLPWISDEVKGIMEEIIEVGESREVQAVLNDEWYQSFHAFTRVFGVGVKTADKWYRMGLRTLEDVRSSKTLKLTPWQKVGLLYYEDLARGVTRAEADAIWLLVQDAVATFDPDAIVEIVGGFRRGKPQGHDVDLLISSPGAEKEQEDQLLQKVMNLWKKQGLLLCGRLEWSQWEDGGSPSGKADEGDAEASCFLILKLYDHLVRKSKRNMPTGSNMGESKPWKAIKVDLLRCPYRSFAFAMLQWTGSRMFRRDLRWYALEEKNMMLDNHSLYDMTRGIFLPAKSEEEIFEHLGLEYLEPFERNA

SEQ ID NO: 4395 - DNA, 1587 bp, synthetic construct
  misc_feature 1..1587: note = Variant of terminal deoxynucleotidyltransferase
  source 1..1587: mol_type = other DNA
atgcaccatcatcatcatcatggcggtagcggcagccacggcattcgtaccatcgattcggacttcgggaagaaacagcagaaaaaaggcgataaccacgatagttccgccacttatgaaatcaaatttcacgagtttgtgctgttcattctcgaagaaaaaatgggtgcgacgcgtcgtacttttctgacagatttagcccgcaagaaagggttccgcgtcgagaatgaactgaccgacgaagttacccacatcgtggcagaaaatctgtcacgctctgaagtattggcttggctgaaagaacacaagatggagaagaccaagcaattcgaactgctggatattagctggcttatcgaaagcatgaaagttggtaaaccggtggacaccaaggggaaataccagttggcggaatcggttgaggtgagtgcgaacccagatccgacagaaggtcgtgtaaacgagctgcctcctactatgaaaaccgtttctccgtatgcgtgtcaacgccgcaccaccctgaacaaccgtaatcaacgttttacggactcgctggagattcttcgtgaaaattacgagctgaaaggcaacgacgatactgcgctggaatttcgtcgtgctatctccgtgctgaaaagccttcagtttgaggtacgtagcctgaaagacacggaaggattgccctggatcagtgatgaagtcaaagggattatggaagaaatcatcgaagtcggggagtcgcgtgaagtgcaggccgtgctcaatgatgagtggtatcaaagcttccacgcatttacgcgtgtctttggagtgggggtgaagacagcagacaagtggtaccgtatgggtctgcgcaccctcgaggatgttcgttccagcaagaccctgaagttgaccccgtggcagaaagtaggtctgctgtattatgaagatcttgctcgcggcgttacgcgtgccgaagctgacgcgatttggctgctggttcaggatgcagtcgcaactttcgacccggatgcgatcgtggagattgtcggtggatttcgtcgtgggaaacctcagggtcacgacgttgatctgcttatcagttctccgggagctgagaaagagcaagaagaccaactcctgcagaaagtgatgaatctgtggaagaaacaagggttgttgctgtgtggtcgtctggaatggagtcagtgggaagatgggggttcgccttccggtaaggctgatgagggtgacgcggaggcgtcgtgctttctgatcctcaaactttatgatcatctggtgcgtaaaagtaaacgcaatatgccgactggttcgaacatgggcgagtccaaaccgtggaaagcaattaaagtagatctgctgcgttgcccctatggcagttttgcgtttgcgatgttgcagtggaccggaagccgcatgttccgtcgtgatctgcgctggtacgccctggaagagaagaacatgatgctggacaatcattcgctgtatgacatgacccgcggtatcttcctccctgctaaatcggaagaggaaattttcgaacatctggggcttgaatacctggaaccgttcgaacgtaacgca

SEQ ID NO: 4396 - protein, 529 aa, synthetic construct
  REGION 1..529: note = Variant of terminal deoxynucleotidyltransferase
MHHHHHHGGSGSHGIRTIDSDFGKKQQKKGDNHDSSATYEIKFHEFVLFILEEKMGATRRTFLTDLARKKGFRVENELTDEVTHIVAENLSRSEVLAWLKEHKMEKTKQFELLDISWLIESMKVGKPVDTKGKYQLAESVEVSANPDPTEGRVNELPPTMKTVSPYACQRRTTLNNRNQRFTDSLEILRENYELKGNDDTALEFRRAISVLKSLQFEVRSLKDTEGLPWISDEVKGIMEEIIEVGESREVQAVLNDEWYQSFHAFTRVFGVGVKTADKWYRMGLRTLEDVRSSKTLKLTPWQKVGLLYYEDLARGVTRAEADAIWLLVQDAVATFDPDAIVEIVGGFRRGKPQGHDVDLLISSPGAEKEQEDQLLQKVMNLWKKQGLLLCGRLEWSQWEDGGSPSGKADEGDAEASCFLILKLYDHLVRKSKRNMPTGSNMGESKPWKAIKVDLLRCPYGSFAFAMLQWTGSRMFRRDLRWYALEEKNMMLDNHSLYDMTRGIFLPAKSEEEIFEHLGLEYLEPFERNA

SEQ ID NO: 4397 - DNA, 1587 bp, synthetic construct
  misc_feature 1..1587: note = Variant of terminal deoxynucleotidyltransferase
  source 1..1587: mol_type = other DNA
atgcaccatcatcatcatcatggcggtagcggcagccacggcattcgtaccatcgattcggacttcgggaagaaacagcagaaaaaaggcgataaccacgatagttccgccacttatgaaatcaaatttcacgagtttgtgctgttcattctcgaagaaaaaatgggtgcgacgcgtcgtacttttctgacagatttagcccgcaagaaagggttccgcgtcgagaatgaactgaccgacgaagttacccacatcgtggcagaaaatctgtcacgctctgaagtattggcttggctgaaagaacacaagatggagaagaccaagcaattcgaactgctggatattagctggcttatcgaaagcatgaaagttggtaaaccggtggacaccaaggggaaataccagttggcggaatcggttgaggtgagtgcgaacccagatccgacagaaggtcgtgtaaacgagctgcctcctactatgaaaaccgtttctccgtatgcgtgtcaacgccgcaccaccctgaacaaccgtaatcaacgttttacggactcgctggagattcttcgtgaaaattacgagctgaaaggcaacgacgatactgcgctggaatttcgtcgtgctatctccgtgctgaaaagccttccgtttgaggtacgtagcctgaaagacacggaaggattgccctggatcagtgatgaagtcaaagggattatggaagaaatcatcgaagtcggggagtcgcgtgaagtgcaggccgtgctcaatgatgagtggtatcaaagcttccacgcatttacgcgtgtctttggagtgggggtgaagacagcagacaagtggtaccgtatgggtctgcgcaccctcgaggatgttcgttccagcaagaccctgaagttgaccccgtggcagaaagtaggtctgctgtattatgaagatcttgctcgcggcgttacgcgtgccgaagctgacgcgatttggctgctggttcaggatgcagtcgcaactttcgacccggatgcgatcgtggagattgtcggtggatttcgtcgtgggaaacctcagggtcacgacgttgatctgcttatcagttctccgggagctgagaaagagcaagaagaccaactcctgcagaaagtgatgaatctgtggaagaaacaagggttgttgctggcgggtcgtctggaatggagtcagtgggaagatgggggttcgccttccggtaaggctgatgagggtgacgcggaggcgtcgtgctttctgatcctcaaactttatgatcatctggtgcgtaaaagtaaacgcaatatgccgactggttcgaacatgggcgagtccaaaccgtggaaagcaattaaagtagatctgctgcgttgcccctatggcagttttgcgtttgcgatgttgcagtggaccggaagccgcatgttccgtcgtgatctgcgctggtacgccctggaagagaagaacatgatgctggacaatcattcgctgtatgacatgacccgcggtatcttcctccctgctaaatcggaagaggaaattttcgaacatctggggcttgaatacctggaaccgttcgaacgtaacgca

SEQ ID NO: 4398 - protein, 529 aa, synthetic construct
  REGION 1..529: note = Variant of terminal deoxynucleotidyltransferase
MHHHHHHGGSGSHGIRTIDSDFGKKQQKKGDNHDSSATYEIKFHEFVLFILEEKMGATRRTFLTDLARKKGFRVENELTDEVTHIVAENLSRSEVLAWLKEHKMEKTKQFELLDISWLIESMKVGKPVDTKGKYQLAESVEVSANPDPTEGRVNELPPTMKTVSPYACQRRTTLNNRNQRFTDSLEILRENYELKGNDDTALEFRRAISVLKSLPFEVRSLKDTEGLPWISDEVKGIMEEIIEVGESREVQAVLNDEWYQSFHAFTRVFGVGVKTADKWYRMGLRTLEDVRSSKTLKLTPWQKVGLLYYEDLARGVTRAEADAIWLLVQDAVATFDPDAIVEIVGGFRRGKPQGHDVDLLISSPGAEKEQEDQLLQKVMNLWKKQGLLLAGRLEWSQWEDGGSPSGKADEGDAEASCFLILKLYDHLVRKSKRNMPTGSNMGESKPWKAIKVDLLRCPYGSFAFAMLQWTGSRMFRRDLRWYALEEKNMMLDNHSLYDMTRGIFLPAKSEEEIFEHLGLEYLEPFERNA

SEQ ID NO: 4399 - DNA, 1587 bp, synthetic construct
  misc_feature 1..1587: note = Variant of terminal deoxynucleotidyltransferase
  source 1..1587: mol_type = other DNA
atgcaccatcatcatcatcatggcggtagcggcagccacggcattcgtaccatcgattcggacttcgggaagaaacagcagaaaaaaggcgataaccacgatagttccgccacttatgaaatcaaatttcacgagtttgtgctgttcattctcgaagaaaaaatgggtgcgacgcgtcgtacttttctgacagatttagcccgcaagaaagggttccgcgtcgagaatgaactgaccgacgaagttacccacatcgtggcagaaaatctgtcacgctctgaagtattggcttggctgaaagaacacaagatggagaagaccaagcaattcgaactgctggatattagctggcttatcgaaagcatgaaagttggtaaaccggtggacaccaaggggaaataccagttggcggaatcggttgaggtgagtgcgaacccagatccgacagaaggtcgtgtaaacgagctgcctcctactatgaaaaccgtttctccgtatgcgtgtcaacgccgcaccaccctgaacaaccgtaatcaacgttttacggactcgctggagattcttcgtgaaaattacgagctgaaaggcaacgacgatactgcgctggaatttcgtcgtgctatctccgtgctgaaaagccttccgtttgaggtacgtagcctgaaagacacggaaggattgccctggatcagtgatgaagtcaaagggattatggaagaaatcatcgaagtcggggagtcgcgtgaagtgcaggccgtgctcaatgatgagtggtatcaaagcttccacgcatttacgcgtgtctttggagtgggggtgaagacagcagacaagtggtaccgtatgggtctgcgcaccctcgaggatgttcgttccagcaagaccctgaagttgaccccgtggcagaaagtaggtctgctgtattatgaagatcttgctcgcggcgttacgcgtgccgaagctgacgcgatttggctgctggttcaggatgcagtcgcaactttcgacccggatgcgatcgtggagattgtcggtggatttcgtcgtgggaaacctcagggtcacgacgttgatctgcttatcagttctccgggagctgagaaagaggaggaagaccaactcctgcagaaagtgatgaatctgtggaagaaacaagggttgttgctgtgtggtcgtctggaatggagtcagtgggaagatgggggttcgccttccggtaaggctgatgagggtgacgcggaggcgtcgtgctttctgatcctcaaactttatgatcatctggtgcgtaaaagtaaacgcaatatgccgactggttcgaacatgggcgagtccaaaccgtggaaagcaattaaagtagatctgctgcgttgcccctatggcagttttgcgtttgcgatgttgcagtggaccggaagccgcatgttccgtcgtgatctgcgctggtacgccctggaagagaagaacatgatgctggacaatcattcgctgtatgacatgacccgcggtatcttcctccctgctaaatcggaagaggaaattttcgaacatctggggcttgaatacctggaaccgttcgaacgtaacgca

SEQ ID NO: 4400 - protein, 529 aa, synthetic construct
  REGION 1..529: note = Variant of terminal deoxynucleotidyltransferase
MHHHHHHGGSGSHGIRTIDSDFGKKQQKKGDNHDSSATYEIKFHEFVLFILEEKMGATRRTFLTDLARKKGFRVENELTDEVTHIVAENLSRSEVLAWLKEHKMEKTKQFELLDISWLIESMKVGKPVDTKGKYQLAESVEVSANPDPTEGRVNELPPTMKTVSPYACQRRTTLNNRNQRFTDSLEILRENYELKGNDDTALEFRRAISVLKSLPFEVRSLKDTEGLPWISDEVKGIMEEIIEVGESREVQAVLNDEWYQSFHAFTRVFGVGVKTADKWYRMGLRTLEDVRSSKTLKLTPWQKVGLLYYEDLARGVTRAEADAIWLLVQDAVATFDPDAIVEIVGGFRRGKPQGHDVDLLISSPGAEKEEEDQLLQKVMNLWKKQGLLLCGRLEWSQWEDGGSPSGKADEGDAEASCFLILKLYDHLVRKSKRNMPTGSNMGESKPWKAIKVDLLRCPYGSFAFAMLQWTGSRMFRRDLRWYALEEKNMMLDNHSLYDMTRGIFLPAKSEEEIFEHLGLEYLEPFERNA

SEQ ID NO: 4401 - DNA, 1587 bp, synthetic construct
  misc_feature 1..1587: note = Variant of terminal deoxynucleotidyltransferase
  source 1..1587: mol_type = other DNA
atgcaccatcatcatcatcatggcggtagcggcagccacggcattcgtaccatcgattcggacttcgggaagaaacagcagaaaaaaggcgataaccacgatagttccgccacttatgaaatcaaatttcacgagtttgtgctgttcattctcgaagaaaaaatgggtgcgacgcgtcgtacttttctgacagatttagcccgcaagaaagggttccgcgtcgagaatgaactgaccgacgaagttacccacatcgtggcagaaaatctgtcacgctctgaagtattggcttggctgaaagaacacaagatggagaagaccaagcaattcgaactgctggatattagctggcttatcgaaagcatgaaagttggtaaaccggtggacaccaaggggaaataccagttggcggaatcggttgaggtgagtgcgaacccagatccgacagaaggtcgtgtaaacgagctgcctcctactatgaaaaccgtttctccgtatgcgtgtcaacgccgcaccaccctgaacaaccgtaatcaacgttttacggactcgctggagattcttcgtgaaaattacgagctgaaaggcaacgacgatactgcgctggaatttcgtcgtgctatctccgtgctgaaaagccttccgtttgaggtacgtagcctgaaagacacggaaggattgccctggatcagtgatgaagtcaaagggattatggaagaaatcatcgaagtcggggagtcgcgtgaagtgcaggccgtgctcaatgatgagtggtatcaaagcttccacgcatttacgcgtgtctttggagtgggggtgaagacagcagacaagtggtaccgtatgggtctgcgcaccctcgaggatgttcgttccagcaagaccctgaagttgaccccgtggcagaaagtaggtctgctgtattatgaagatcttgctcgcggcgttacgcgtgccgaagctgacgcgatttggctgctggttcaggatgcagtcgcaactttcgacccggatgcgatcgtggagattgtcggtggatttcgtcgtgggaaacctcagggtcacgacgttgatctgcttatcagttctccgggagctgagaaagagcaagaagaccaactcctgcagaaagtgatgaatctgtggaagtctcaagggttgttgctgtgtggtcgtctggaatggagtcagtgggaagatgggggttcgccttccggtaaggctgatgagggtgacgcggaggcgtcgtgctttctgatcctcaaactttatgatcatctggtgcgtaaaagtaaacgcaatatgccgactggttcgaacatgggcgagtccaaaccgtggaaagcaattaaagtagatctgctgcgttgcccctatggcagttttgcgtttgcgatgttgcagtggaccggaagccgcatgttccgtcgtgatctgcgctggtacgccctggaagagaagaacatgatgctggacaatcattcgctgtatgacatgacccgcggtatcttcctccctgctaaatcggaagaggaaattttcgaacatctggggcttgaatacctggaaccgttcgaacgtaacgca

SEQ ID NO: 4402 - protein, 529 aa, synthetic construct
  REGION 1..529: note = Variant of terminal deoxynucleotidyltransferase
MHHHHHHGGSGSHGIRTIDSDFGKKQQKKGDNHDSSATYEIKFHEFVLFILEEKMGATRRTFLTDLARKKGFRVENELTDEVTHIVAENLSRSEVLAWLKEHKMEKTKQFELLDISWLIESMKVGKPVDTKGKYQLAESVEVSANPDPTEGRVNELPPTMKTVSPYACQRRTTLNNRNQRFTDSLEILRENYELKGNDDTALEFRRAISVLKSLPFEVRSLKDTEGLPWISDEVKGIMEEIIEVGESREVQAVLNDEWYQSFHAFTRVFGVGVKTADKWYRMGLRTLEDVRSSKTLKLTPWQKVGLLYYEDLARGVTRAEADAIWLLVQDAVATFDPDAIVEIVGGFRRGKPQGHDVDLLISSPGAEKEQEDQLLQKVMNLWKSQGLLLCGRLEWSQWEDGGSPSGKADEGDAEASCFLILKLYDHLVRKSKRNMPTGSNMGESKPWKAIKVDLLRCPYGSFAFAMLQWTGSRMFRRDLRWYALEEKNMMLDNHSLYDMTRGIFLPAKSEEEIFEHLGLEYLEPFERNA

SEQ ID NO: 4403 - DNA, 1587 bp, synthetic construct
  misc_feature 1..1587: note = Variant of terminal deoxynucleotidyltransferase
  source 1..1587: mol_type = other DNA
atgcaccatcatcatcatcatggcggtagcggcagccacggcattcgtaccatcgattcggacttcgggaagaaacagcagaaaaaaggcgataaccacgatagttccgccacttatgaaatcaaatttcacgagtttgtgctgttcattctcgaagaaaaaatgggtgcgacgcgtcgtacttttctgacagatttagcccgcaagaaagggttccgcgtcgagaatgaactgaccgacgaagttacccacatcgtggcagaaaatctgtcacgctctgaagtattggcttggctgaaagaacacaagatggagaagaccaagcaattcgaactgctggatattagctggcttatcgaaagcatgaaagttggtaaaccggtggacaccaaggggaaataccagttggcggaatcggttgaggtgagtgcgaacccagatccgacagaaggtcgtgtaaacgagctgcctcctactatgaaaaccgtttctccgtatgcgtgtcaacgccgcaccaccctgaacaaccgtaatcaacgttttacggactcgctggagattcttcgtgaaaattacgagctgaaaggcaacgacgatactgcgctggaatttcgtcgtgctatctccgtgctgaaaagccttccgtttgaggtacgtagcctgaaagacacggaaggattgccctggatcagtgatgaagtcaaagggattatggaagaaatcatcgaagtcggggagtcgcgtgaagtgcaggccgtgctcaatgatgagtggtatcaaagcttccacgcatttacgcgtgtctttggagtgggggtgaagacagcagacaagtggtaccgtatgggtctgcgcaccctcgaggatgttcgttccagcaagaccctgaagttgaccccgtggcagaaagtaggtctgctgtattatgaagatcttgctcgcggcgttacgcgtgccgaagctgacgcgatttggctgctggttcaggatgcagtcgcaactttcgacccgcaggcgatcgtggagattgtcggtggatttcgtcgtgggaaacctcagggtcacgacgttgatctgcttatcagttctccgggagctgagaaagagcaagaagaccaactcctgcagaaagtgatgaatctgtggaagaaacaagggttgttgctgtgtggtcgtctggaatggagtcagtgggaagatgggggttcgccttccggtaaggctgatgagggtgacgcggaggcgtcgtgctttctgatcctcaaactttatgatcatctggtgcgtaaaagtaaacgcaatatgccgactggttcgaacatgggcgagtccaaaccgtggaaagcaattaaagtagatctgctgcgttgcccctatggcagttttgcgtttgcgatgttgcagtggaccggaagccgcatgttccgtcgtgatctgcgctggtacgccctggaagagaagaacatgatgctggacaatcattcgctgtatgacatgacccgcggtatcttcctccctgctaaatcggaagaggaaattttcgaacatctggggcttgaatacctggaaccgttcgaacgtaacgca

SEQ ID NO: 4404 - protein, 529 aa, synthetic construct
  REGION 1..529: note = Variant of terminal deoxynucleotidyltransferase
MHHHHHHGGSGSHGIRTIDSDFGKKQQKKGDNHDSSATYEIKFHEFVLFILEEKMGATRRTFLTDLARKKGFRVENELTDEVTHIVAENLSRSEVLAWLKEHKMEKTKQFELLDISWLIESMKVGKPVDTKGKYQLAESVEVSANPDPTEGRVNELPPTMKTVSPYACQRRTTLNNRNQRFTDSLEILRENYELKGNDDTALEFRRAISVLKSLPFEVRSLKDTEGLPWISDEVKGIMEEIIEVGESREVQAVLNDEWYQSFHAFTRVFGVGVKTADKWYRMGLRTLEDVRSSKTLKLTPWQKVGLLYYEDLARGVTRAEADAIWLLVQDAVATFDPQAIVEIVGGFRRGKPQGHDVDLLISSPGAEKEQEDQLLQKVMNLWKKQGLLLCGRLEWSQWEDGGSPSGKADEGDAEASCFLILKLYDHLVRKSKRNMPTGSNMGESKPWKAIKVDLLRCPYGSFAFAMLQWTGSRMFRRDLRWYALEEKNMMLDNHSLYDMTRGIFLPAKSEEEIFEHLGLEYLEPFERNA

SEQ ID NO: 4405 - DNA, 1587 bp, synthetic construct
  misc_feature 1..1587: note = Variant of terminal deoxynucleotidyltransferase
  source 1..1587: mol_type = other DNA
atgcaccatcatcatcatcatggcggtagcggcagccacggcattcgtaccatcgattcggacttcgggaagaaacagcagaaaaaaggcgataaccacgatagttccgccacttatgaaatcaaatttcacgagtttgtgctgttcattctcgaagaaaaaatgggtgcgacgcgtcgtacttttctgacagatttagcccgcaagaaagggttccgcgtcgagaatgaactgaccgacgaagttacccacatcgtggcagaaaatctgtcacgctctgaagtattggcttggctgaaagaacacaagatggagaagaccaagcaattcgaactgctggatattagctggcttatcgaaagcatgaaagttggtaaaccggtggacaccaaggggaaataccagttggcggaatcggttgaggtgagtgcgaacccagatccgacagaaggtcgtgtaaacgagctgcctcctactatgaaaaccgtttctccgtatgcgtgtcaacgccgcaccaccctgaacaaccgtaatcaacgttttacggactcgctggagattcttcgtgaaaattacgagctgaaaggcaacgacgatactgcgctggaatttcgtcgtgctatctccgtgctgaaaagccttccgtttgaggtacgtagcctgaaagacacggaaggattgccctggatcagtgatgaagtcaaagggattatggaagaaatcatcgaagtcggggagtcgcgtgaagtgcaggccgtgctcaatgatgagtggtatcaaagcttccacgcatttacgcgtgtctttggagtgggggtgaagacagcagacaagtggtaccgtatgggtctgcgcaccctcgaggatgttcgttccagcaagaccctgaagttgaccccgtggcagaaagtaggtctgctgtattatgaagatcttgctcgcggcgttacgcgtgccgaagctgacgcgatttggctgctggttcaggatgcagtcgcaactttcgacccggatgcgatcgtggagattgtcggtggatttcgtcgtgggaaacctcagggtcacgacgttgatctgcttatcagttctccgggagctgagaaagagcaagaagaccaactcctgcagaaagtgatgaatctgtggaagaaacaagggttgttgctgtgtggtcgtctggaatggagtcagtgggaagatgggggttcgccttccggtaaggctgatgagggtgacgcggaggcgtcgtgctttctgatcctcaaactttatgatcatctggtgcgtaaaagtaaacgcaatatgccgactggttcgaacatgggcgagtccaaaccgtggaaagcaattaaagtagatctgctgcgttgcccctatggcagttttgcgtttgcgatgttgcagtggaccggaagccgcatgttccgtcgtgatctgcgctggtacgccctggaagagaagaacatgatgctggacaatcattcgctgtatgacatgacccgcggtatcttcctccctgctaaatcggaagagcggattttcgaacatctggggcttgaatacctggaaccgttcgaacgtaacgca

SEQ ID NO: 4406 - protein, 529 aa, synthetic construct
  REGION 1..529: note = Variant of terminal deoxynucleotidyltransferase
MHHHHHHGGSGSHGIRTIDSDFGKKQQKKGDNHDSSATYEIKFHEFVLFILEEKMGATRRTFLTDLARKKGFRVENELTDEVTHIVAENLSRSEVLAWLKEHKMEKTKQFELLDISWLIESMKVGKPVDTKGKYQLAESVEVSANPDPTEGRVNELPPTMKTVSPYACQRRTTLNNRNQRFTDSLEILRENYELKGNDDTALEFRRAISVLKSLPFEVRSLKDTEGLPWISDEVKGIMEEIIEVGESREVQAVLNDEWYQSFHAFTRVFGVGVKTADKWYRMGLRTLEDVRSSKTLKLTPWQKVGLLYYEDLARGVTRAEADAIWLLVQDAVATFDPDAIVEIVGGFRRGKPQGHDVDLLISSPGAEKEQEDQLLQKVMNLWKKQGLLLCGRLEWSQWEDGGSPSGKADEGDAEASCFLILKLYDHLVRKSKRNMPTGSNMGESKPWKAIKVDLLRCPYGSFAFAMLQWTGSRMFRRDLRWYALEEKNMMLDNHSLYDMTRGIFLPAKSEERIFEHLGLEYLEPFERNA

SEQ ID NO: 4407 - DNA, 1587 bp, synthetic construct
  misc_feature 1..1587: note = Variant of terminal deoxynucleotidyltransferase
  source 1..1587: mol_type = other DNA
atgcaccatcatcatcatcatggcggtagcggcagccacggcattcgtaccatcgattcggacttcgggaagaaacagcagaaaaaaggcgataaccacgatagttccgccacttatgaaatcaaatttcacgagtttgtgctgttcattctcgaagaaaaaatgggtgcgacgcgtcgtacttttctgacagatttagcccgcaagaaagggttccgcgtcgagaatgaactgaccgacgaagttacccacatcgtggcagaaaatctgtcacgctctgaagtattggcttggctgaaagaacacaagatggagaagaccaagcaattcgaactgctggatattagctggcttatcgaaagcatgaaagttggtaaaccggtggacaccaaggggaaataccagttggcggaatcggttgaggtgagtgcgaacccagatccgacagaaggtcgtgtaaacgagctgcctcctactatgaaaaccgtttctccgtatgcgtgtcaacgccgcaccaccctgaacaaccgtaatcaacgttttacggactcgctggagattcttcgtgaaaattacgagctgaaaggcaacgacgatactgcgctggaatttcgtcgtgctatctccgtgctgaaaagccttccgtttgaggtacgtagcctgaaagacacggaaggattgccctggatcagtgatgaagtcaaagggattatggaagaaatcatcgaagtcggggagtcgcgtgaagtgcaggccgtgctcaatgatgagtggtatcaaagcttccacgcatttacgcgtgtctttggagtgggggtgaagacagcagacaagtggtaccgtatgggtctgcgcaccctcgaggatgttcgttccagcaagaccctgaagttgaccccgtggcagaaagtaggtctgctgtattatgaagatcttgctcgcggcgttacgcgtgccgaagctgacgcgatttggctgctggttcaggatgcagtcgcaactttcgacccggatgcgatcgtggagattgtcggtggatttcgtcgtgggaaacctcagggtcacgacgttgatctgcttatcagttctccgggagctgagaaagagcaagaagaccaactcctgcagaaagtgatgaatctgtggaagaaacaagggttgttgctgtgtggtcgtctggaatggagtcagtgggaagatgggtcttcgccttccggtaaggctgatgagggtgacgcggaggcgtcgtgctttctgatcctcaaactttatgatcatctggtgcgtaaaagtaaacgcaatatgccgactggttcgaacatgggcgagtccaaaccgtggaaagcaattaaagtagatctgctgcgttgcccctatggcagttttgcgtttgcgatgttgcagtggaccggaagccgcatgttccgtcgtgatctgcgctggtacgccctggaagagaagaacatgatgctggacaatcattcgctgtatgacatgacccgcggtatcttcctccctgctaaatcggaagaggaaattttcgaacatctggggcttgaatacctggaaccgttcgaacgtaacgca

SEQ ID NO: 4408 - protein, 529 aa, synthetic construct
  REGION 1..529: note = Variant of terminal deoxynucleotidyltransferase
MHHHHHHGGSGSHGIRTIDSDFGKKQQKKGDNHDSSATYEIKFHEFVLFILEEKMGATRRTFLTDLARKKGFRVENELTDEVTHIVAENLSRSEVLAWLKEHKMEKTKQFELLDISWLIESMKVGKPVDTKGKYQLAESVEVSANPDPTEGRVNELPPTMKTVSPYACQRRTTLNNRNQRFTDSLEILRENYELKGNDDTALEFRRAISVLKSLPFEVRSLKDTEGLPWISDEVKGIMEEIIEVGESREVQAVLNDEWYQSFHAFTRVFGVGVKTADKWYRMGLRTLEDVRSSKTLKLTPWQKVGLLYYEDLARGVTRAEADAIWLLVQDAVATFDPDAIVEIVGGFRRGKPQGHDVDLLISSPGAEKEQEDQLLQKVMNLWKKQGLLLCGRLEWSQWEDGSSPSGKADEGDAEASCFLILKLYDHLVRKSKRNMPTGSNMGESKPWKAIKVDLLRCPYGSFAFAMLQWTGSRMFRRDLRWYALEEKNMMLDNHSLYDMTRGIFLPAKSEEEIFEHLGLEYLEPFERNA

SEQ ID NO: 4409 - DNA, 1587 bp, synthetic construct
  misc_feature 1..1587: note = Variant of terminal deoxynucleotidyltransferase
  source 1..1587: mol_type = other DNA
atgcaccatcatcatcatcatggcggtagcggcagccacggcattcgtaccatcgattcggacttcgggaagaaacagcagaaaaaaggcgataaccacgatagttccgccacttatgaaatcaaatttcacgagtttgtgctgttcattctcgaagaaaaaatgggtgcgacgcgtcgtacttttctgacagatttagcccgcaagaaagggttccgcgtcgagaatgaactgaccgacgaagttacccacatcgtggcagaaaatctgtcacgctctgaagtattggcttggctgaaagaacacaagatggagaagaccaagcaattcgaactgctggatattagctggcttatcgaaagcatgaaagttggtaaaccggtggacaccaaggggaaataccagttggcggaatcggttgaggtgagtgcgaacccagatccgacagaaggtcgtgtaaacgagctgcctcctactatgaaaaccgtttctccgtatgcgtgtcaacgccgcaccaccctgaacaaccgtaatcaacgttttacggactcgctggagattcttcgtgaaaattacgagctgaaaggcaacgacgatactgcgctggaatttcgtcgtgctatctccgtgctgaaaagccttccgtttgaggtacgtagcctgaaagacacggaaggattgccctggatcagtgatgaagtcaaagggattatggaagaaatcatcgaagtcggggagtcgcgtgaagtgcaggccgtgctcaatgatgagtggtatcaaagcttccacgcatttacgcgtgtctttggagtgggggtgaagacagcagacaagtggtaccgtatgggtctgcgcaccctcgaggatgttcgttccagcgataccctgaagttgaccccgtggcagaaagtaggtctgctgtattatgaagatcttgctcgcggcgttacgcgtgccgaagctgacgcgatttggctgctggttcaggatgcagtcgcaactttcgacccggatgcgatcgtggagattgtcggtggatttcgtcgtgggaaacctcagggtcacgacgttgatctgcttatcagttctccgggagctgagaaagagcaagaagaccaactcctgcagaaagtgatgaatctgtggaagaaacaagggttgttgctgtgtggtcgtctggaatggagtcagtgggaagatgggggttcgccttccggtaaggctgatgagggtgacgcggaggcgtcgtgctttctgatcctcaaactttatgatcatctggtgcgtaaaagtaaacgcaatatgccgactggttcgaacatgggcgagtccaaaccgtggaaagcaattaaagtagatctgctgcgttgcccctatggcagttttgcgtttgcgatgttgcagtggaccggaagccgcatgttccgtcgtgatctgcgctggtacgccctggaagagaagaacatgatgctggacaatcattcgctgtatgacatgacccgcggtatcttcctccctgctaaatcggaagaggaaattttcgaacatctggggcttgaatacctggaaccgttcgaacgtaacgca

SEQ ID NO: 4410 - protein, 529 aa, synthetic construct
  REGION 1..529: note = Variant of terminal deoxynucleotidyltransferase
MHHHHHHGGSGSHGIRTIDSDFGKKQQKKGDNHDSSATYEIKFHEFVLFILEEKMGATRRTFLTDLARKKGFRVENELTDEVTHIVAENLSRSEVLAWLKEHKMEKTKQFELLDISWLIESMKVGKPVDTKGKYQLAESVEVSANPDPTEGRVNELPPTMKTVSPYACQRRTTLNNRNQRFTDSLEILRENYELKGNDDTALEFRRAISVLKSLPFEVRSLKDTEGLPWISDEVKGIMEEIIEVGESREVQAVLNDEWYQSFHAFTRVFGVGVKTADKWYRMGLRTLEDVRSSDTLKLTPWQKVGLLYYEDLARGVTRAEADAIWLLVQDAVATFDPDAIVEIVGGFRRGKPQGHDVDLLISSPGAEKEQEDQLLQKVMNLWKKQGLLLCGRLEWSQWEDGGSPSGKADEGDAEASCFLILKLYDHLVRKSKRNMPTGSNMGESKPWKAIKVDLLRCPYGSFAFAMLQWTGSRMFRRDLRWYALEEKNMMLDNHSLYDMTRGIFLPAKSEEEIFEHLGLEYLEPFERNA

SEQ ID NO: 4411 - DNA, 1587 bp, synthetic construct
  misc_feature 1..1587: note = Variant of terminal deoxynucleotidyltransferase
  source 1..1587: mol_type = other DNA
atgcaccatcatcatcatcatggcggtagcggcagccacggcattcgtaccatcgattcggacttcgggaagaaacagcagaaaaaaggcgataaccacgatagttccgccacttatgaaatcaaatttcacgagtttgtgctgttcattctcgaagaaaaaatgggtgcgacgcgtcgtacttttctgacagatttagcccgcaagaaagggttccgcgtcgagaatgaactgaccgacgaagttacccacatcgtggcagaaaatctgtcacgctctgaagtattggcttggctgaaagaacacaagatggagaagaccaagcaattcgaactgctggatattagctggcttatcgaaagcatgaaagttggtaaaccggtggacaccaaggggaaataccagttggcggaatcggttgaggtgagtgcgaacccagatccgacagaaggtcgtgtaaacgagctgcctcctactatgaaaaccgtttctccgtatgcgtgtcaacgccgcaccaccctgaacaaccgtaatcaacgttttacggactcgctggagattcttcgtgaaaattacgagctgaaaggcaacgacgatactgcgctggaatttcgtcgtgctatctccgtgctgaaaagccttccgtttgaggtacgtagcctgaaagacacggaaggattgccctggatcagtgatgaagtcaaagggattatggaagaaatcatcgaagtcggggagtcgcgtgaagtgcaggccgtgctcaatgatgagtggtatcaaagcttccacgcatttacgcgtgtctttggagtgggggtgaagacagcagacaagtggtaccgtatgggtctgcgcaccctcgaggatgttcgttccagcaagaccctgaagttgaccccgtggcagaaagtaggtctgctgtattatgaagatcttgctcgcggcgttacgcgtgccgaagctgacgcgatttggctgctggttcaggatgcagtcgcaactttcgacccggatgcgatcgtggagattgtcggtggatttcgtcgtgggaaacctcagggtcacgacgttgatctgcttatcagttctccgggagctgagaaagagcaagaagaccaactcctgcagaaagtgatgaatctgtggaagaaacaagggttgttgctgtgtggtcgtctggaatggagtcagtgggaagatgggaaatcgccttccggtaaggctgatgagggtgacgcggaggcgtcgtgctttctgatcctcaaactttatgatcatctggtgcgtaaaagtaaacgcaatatgccgactggttcgaacatgggcgagtccaaaccgtggaaagcaattaaagtagatctgctgcgttgcccctatggcagttttgcgtttgcgatgttgcagtggaccggaagccgcatgttccgtcgtgatctgcgcgactacgcccgtgaagagaagaacatgatgctggacaatcattcgctgtatgacatgacccgcggtatcttcctccctgctaaatcggaagagcgcattttcgaacatctggggcttgaatacctggaaccgttcgaacgtaacgca

SEQ ID NO: 4412 - protein, 529 aa, synthetic construct
  REGION 1..529: note = Variant of terminal deoxynucleotidyltransferase
MHHHHHHGGSGSHGIRTIDSDFGKKQQKKGDNHDSSATYEIKFHEFVLFILEEKMGATRRTFLTDLARKKGFRVENELTDEVTHIVAENLSRSEVLAWLKEHKMEKTKQFELLDISWLIESMKVGKPVDTKGKYQLAESVEVSANPDPTEGRVNELPPTMKTVSPYACQRRTTLNNRNQRFTDSLEILRENYELKGNDDTALEFRRAISVLKSLPFEVRSLKDTEGLPWISDEVKGIMEEIIEVGESREVQAVLNDEWYQSFHAFTRVFGVGVKTADKWYRMGLRTLEDVRSSKTLKLTPWQKVGLLYYEDLARGVTRAEADAIWLLVQDAVATFDPDAIVEIVGGFRRGKPQGHDVDLLISSPGAEKEQEDQLLQKVMNLWKKQGLLLCGRLEWSQWEDGKSPSGKADEGDAEASCFLILKLYDHLVRKSKRNMPTGSNMGESKPWKAIKVDLLRCPYGSFAFAMLQWTGSRMFRRDLRDYAREEKNMMLDNHSLYDMTRGIFLPAKSEERIFEHLGLEYLEPFERNA

SEQ ID NO: 4413 - DNA, 1587 bp, synthetic construct
  misc_feature 1..1587: note = Variant of terminal deoxynucleotidyltransferase
  source 1..1587: mol_type = other DNA
atgcaccatcatcatcatcatggcggtagcggcagccacggcattcgtaccatcgattcggacttcgggaagaaacagcagaaaaaaggcgataaccacgatagttccgccacttatgaaatcaaatttcacgagtttgtgctgttcattctcgaagaaaaaatgggtgcgacgcgtcgtacttttctgacagatttagcccgcaagaaagggttccgcgtcgagaatgaactgaccgacgaagttacccacatcgtggcagaaaatctgtcacgctctgaagtattggcttggctgaaagaacacaagatggagaagaccaagcaattcgaactgctggatattagctggcttatcgaaagcatgaaagttggtaaaccggtggacaccaaggggaaataccagttggcggaatcggttgaggtgagtgcgaacccagatccgacagaaggtcgtgtaaacgagctgcctcctactatgaaaaccgtttctccgtatgcgtgtcaacgccgcaccaccctgaacaaccgtaatcaacgttttacggactcgctggagattcttcgtgaaaattacgagctgaaaggcaacgacgatactgcgctggaatttcgtcgtgctatctccgtgctgaaaagccttccgtttgaggtacgtagcctgaaagacacggaaggattgccctggatcagtgatgaagtcaaagggattatggaagaaatcatcgaagtcggggagtcgcgtgaagtgcaggccgtgctcaatgatgagtggtatcaaagcttccacgcatttacgcgtgtctttggagtgggggtgaagacagcagacaagtggtaccgtatgggtctgcgcaccctcgaggatgttcgttccagcaagaccctgaagttgaccccgtggcagaaagtaggtctgctgtattatgaagatcttgctcgcggcgttacgcgtgccgaagctgacgcgatttggctgctggttcaggatgcagtcgcaactttcgacccggatgcgatcgtggagattgtcggtggatttcgtcgtgggaaacctcagggtcacgacgttgatctgcttatcagttctccgggagctgagaaagagcaagaagaccaactcctgcagaaagtgatgaatctgtggaagaaacaagggttgttgctgtgtggtcgtctggaatggagtcagtgggaagatgggggttcgccttccggtaaggctgatgagggtgacgcggaggcgtcgtgctttctgatcctcaaactttatgatcatctggtgcgtaaaagtaaacgcaatatgccgactggttcgaacatgggcgagtccaaaccgtggaaagcaattaaagtagatctgctgcgttgcccctatggcagttttgcgtttgcgatgttgcagtggaccggaagccgcatgttccgtcgtgatctgcgctggtacgccctggaagagaagaacatgatgctggacaatcattcgctgtatgacatgacccgcggtatcttcctccctgctaaatcggaagaggaaattttcccgcatctggggcttgaatacctggaaccgttcgaacgtaacgca

SEQ ID NO: 4414 - protein, 529 aa, synthetic construct
  REGION 1..529: note = Variant of terminal deoxynucleotidyltransferase
MHHHHHHGGSGSHGIRTIDSDFGKKQQKKGDNHDSSATYEIKFHEFVLFILEEKMGATRRTFLTDLARKKGFRVENELTDEVTHIVAENLSRSEVLAWLKEHKMEKTKQFELLDISWLIESMKVGKPVDTKGKYQLAESVEVSANPDPTEGRVNELPPTMKTVSPYACQRRTTLNNRNQRFTDSLEILRENYELKGNDDTALEFRRAISVLKSLPFEVRSLKDTEGLPWISDEVKGIMEEIIEVGESREVQAVLNDEWYQSFHAFTRVFGVGVKTADKWYRMGLRTLEDVRSSKTLKLTPWQKVGLLYYEDLARGVTRAEADAIWLLVQDAVATFDPDAIVEIVGGFRRGKPQGHDVDLLISSPGAEKEQEDQLLQKVMNLWKKQGLLLCGRLEWSQWEDGGSPSGKADEGDAEASCFLILKLYDHLVRKSKRNMPTGSNMGESKPWKAIKVDLLRCPYGSFAFAMLQWTGSRMFRRDLRWYALEEKNMMLDNHSLYDMTRGIFLPAKSEEEIFPHLGLEYLEPFERNA

SEQ ID NO: 4415 - DNA, 1587 bp, synthetic construct
  misc_feature 1..1587: note = Variant of terminal deoxynucleotidyltransferase
  source 1..1587: mol_type = other DNA
atgcaccatcatcatcatcatggcggtagcggcagccacggcattcgtaccatcgattcggacttcgggaagaaacagcagaaaaaaggcgataaccacgatagttccgccacttatgaaatcaaatttcacgagtttgtgctgttcattctcgaagaaaaaatgggtgcgacgcgtcgtacttttctgacagatttagcccgcaagaaagggttccgcgtcgagaatgaactgaccgacgaagttacccacatcgtggcagaaaatctgtcacgctctgaagtattggcttggctgaaagaacacaagatggagaagaccaagcaattcgaactgctggatattagctggcttatcgaaagcatgaaagttggtaaaccggtggacaccaaggggaaataccagttggcggaatcggttgaggtgagtgcgaacccagatccgacagaaggtcgtgtaaacgagctgcctcctactatgaaaaccgtttctccgtatgcgtgtcaacgccgcaccaccctgaacaaccgtaatcaacgttttacggactcgctggagattcttcgtgaaaattacgagctgaaaggcaacgacgatactgcgctggaatttcgtcgtgctatctccgtgctgaaaagccttccgtttgaggtacgtagcctgaaagacacggaaggattgccctggatcagtgatgaagtcaaagggattatggaagaaatcatcgaagtcggggagtcgcgtgaagtgcaggccgtgctcaatgatgagtggtatcaaagcttccacgcatttacgcgtgtctttggagtgggggtgaagacagcagacaagtggtaccgtatgggtctgcgcaccctcgaggatgttcgttccagcaagaccctgaagttgaccccgtggcagaaagtaggtctgctgtattatgaagatcttgctcgcggcgttacgcgtgccgaagctgacgcgatttggctgctggttcaggatgcagtcgcaactttcgacccggatgcgatcgtggagattgtcggtggatttcgtcgtgggaaacctcagggtcacgacgttgatctgcttatcagttctccgggagctgagaaagagcaagaagaccaactcctgcagaaagtgatgaatctgtggaagaaacaagggttgttgctgtgtggtcgtctggaatggagtcagtgggaagatgggaaatcgccttccggtaaggctgatgagggtgacgcggaggcgtcgtgctttctgatcctcaaactttatgatcatctggtgcgtaaaagtaaacgcaatatgccgactggttcgaacatgggcgagtccaaaccgtggaaagcaattaaagtagatctgctgcgttgcccctatggcagttttgcgtttgcgatgttgcagtggaccggaagccgcatgttccgtcgtgatctgcgctggtacgccctggaagagaagaacatgatgctggacaatcattcgctgtatgacatgacccgcggtatcttcctccctgctaaatcggaagagcgcattttcgaacatctggggcttgaatacctggaaccgttcgaacgtaacgca

SEQ ID NO: 4416 - protein, 529 aa, synthetic construct
  REGION 1..529: note = Variant of terminal deoxynucleotidyltransferase
MHHHHHHGGSGSHGIRTIDSDFGKKQQKKGDNHDSSATYEIKFHEFVLFILEEKMGATRRTFLTDLARKKGFRVENELTDEVTHIVAENLSRSEVLAWLKEHKMEKTKQFELLDISWLIESMKVGKPVDTKGKYQLAESVEVSANPDPTEGRVNELPPTMKTVSPYACQRRTTLNNRNQRFTDSLEILRENYELKGNDDTALEFRRAISVLKSLPFEVRSLKDTEGLPWISDEVKGIMEEIIEVGESREVQAVLNDEWYQSFHAFTRVFGVGVKTADKWYRMGLRTLEDVRSSKTLKLTPWQKVGLLYYEDLARGVTRAEADAIWLLVQDAVATFDPDAIVEIVGGFRRGKPQGHDVDLLISSPGAEKEQEDQLLQKVMNLWKKQGLLLCGRLEWSQWEDGKSPSGKADEGDAEASCFLILKLYDHLVRKSKRNMPTGSNMGESKPWKAIKVDLLRCPYGSFAFAMLQWTGSRMFRRDLRWYALEEKNMMLDNHSLYDMTRGIFLPAKSEERIFEHLGLEYLEPFERNA

SEQ ID NO: 4417 - DNA, 1587 bp, synthetic construct
  misc_feature 1..1587: note = Variant of terminal deoxynucleotidyltransferase
  source 1..1587: mol_type = other DNA
atgcaccatcatcatcatcatggcggtagcggcagccacggcattcgtaccatcgattcggacttcgggaagaaacagcagaaaaaaggcgataaccacgatagttccgccacttatgaaatcaaatttcacgagtttgtgctgttcattctcgaagaaaaaatgggtgcgacgcgtcgtacttttctgacagatttagcccgcaagaaagggttccgcgtcgagaatgaactgaccgacgaagttacccacatcgtggcagaaaatctgtcacgctctgaagtattggcttggctgaaagaacacaagatggagaagaccaagcaattcgaactgctggatattagctggcttatcgaaagcatgaaagttggtaaaccggtggacaccaaggggaaataccagttggcggaatcggttgaggtgagtgcgaacccagatccgacagaaggtcgtgtaaacgagctgcctcctactatgaaaaccgtttctccgtatgcgtgtcaacgccgcaccaccctgaacaaccgtaatcaacgttttacggactcgctggagattcttcgtgaaaattacgagctgaaaggcaacgacgatactgcgctggaatttcgtcgtgctatctccgtgctgaaaagccttccgtttgaggtacgtagcctgaaagacacggaaggattgccctggatcagtgatgaagtcaaagggattatggaagaaatcatcgaagtcggggagtcgcgtgaagtgcaggccgtgctcaatgatgagtggtatcaaagcttccacgcatttacgcgtgtctttggagtgggggtgaagacagcagacaagtggtaccgtatgggtctgcgcaccctcgaggatgttcgttccagcaagaccctgaagttgaccccgtggcagaaagtaggtctgctgtattatgaagatcttgctcgcggcgttacgcgtgccgaagctgacgcgatttggctgctggttcaggatgcagtcgcaactttcgacccggataggatcgtggagattgtcggtggatttcgtcgtgggaaacctcagggtcacgacgttgatctgcttatcagttctccgggagctgagaaagagcaagaagaccaactcctgcagaaagtgatgaatctgtggaagaaacaagggttgttgctgtgtggtcgtctggaatggagtcagtgggaagatgggggttcgccttccggtaaggctgatgagggtgacgcggaggcgtcgtgctttctgatcctcaaactttatgatcatctggtgcgtaaaagtaaacgcaatatgccgactggttcgaacatgggcgagtccaaaccgtggaaagcaattaaagtagatctgctgcgttgcccctatggcagttttgcgtttgcgatgttgcagtggaccggaagccgcatgttccgtcgtgatctgcgctggtacgccctggaagagaagaacatgatgctggacaatcattcgctgtatgacatgacccgcggtatcttcctccctgctaaatcggaagaggaaattttcgaacatctggggcttgaatacctggaaccgttcgaacgtaacgca

SEQ ID NO: 4418 - protein, 529 aa, synthetic construct
  REGION 1..529: note = Variant of terminal deoxynucleotidyltransferase
MHHHHHHGGSGSHGIRTIDSDFGKKQQKKGDNHDSSATYEIKFHEFVLFILEEKMGATRRTFLTDLARKKGFRVENELTDEVTHIVAENLSRSEVLAWLKEHKMEKTKQFELLDISWLIESMKVGKPVDTKGKYQLAESVEVSANPDPTEGRVNELPPTMKTVSPYACQRRTTLNNRNQRFTDSLEILRENYELKGNDDTALEFRRAISVLKSLPFEVRSLKDTEGLPWISDEVKGIMEEIIEVGESREVQAVLNDEWYQSFHAFTRVFGVGVKTADKWYRMGLRTLEDVRSSKTLKLTPWQKVGLLYYEDLARGVTRAEADAIWLLVQDAVATFDPDRIVEIVGGFRRGKPQGHDVDLLISSPGAEKEQEDQLLQKVMNLWKKQGLLLCGRLEWSQWEDGGSPSGKADEGDAEASCFLILKLYDHLVRKSKRNMPTGSNMGESKPWKAIKVDLLRCPYGSFAFAMLQWTGSRMFRRDLRWYALEEKNMMLDNHSLYDMTRGIFLPAKSEEEIFEHLGLEYLEPFERNA

SEQ ID NO: 4419 - DNA, 1587 bp, synthetic construct
  misc_feature 1..1587: note = Variant of terminal deoxynucleotidyltransferase
  source 1..1587: mol_type = other DNA
atgcaccatcatcatcatcatggcggtagcggcagccacggcattcgtaccatcgattcggacttcgggaagaaacagcagaaaaaaggcgataaccacgatagttccgccacttatgaaatcaaatttcacgagtttgtgctgttcattctcgaagaaaaaatgggtgcgacgcgtcgtacttttctgacagatttagcccgcaagaaagggttccgcgtcgagaatgaactgaccgacgaagttacccacatcgtggcagaaaatctgtcacgctctgaagtattggcttggctgaaagaacacaagatggagaagaccaagcaattcgaactgctggatattagctggcttatcgaaagcatgaaagttggtaaaccggtggacaccaaggggaaataccagttggcggaatcggttgaggtgagtgcgaacccagatccgacagaaggtcgtgtaaacgagctgcctcctactatgaaaaccgttgggccgtatgcgtgtcaacgccgcaccaccctgaacaaccgtaatcaacgttttacggactcgctggagattcttcgtgaaaattacgagctgaaaggcaacgacgatactgcgctggaatttcgtcgtgctatctccgtgctgaaaagccttccgtttgaggtacgtagcctgaaagacacggaaggattgccctggatcagtgatgaagtcaaagggattatggaagaaatcatcgaagtcggggagtcgcgtgaagtgcaggccgtgctcaatgatgagtggtatcaaagcttccacgcatttacgcgtgtctttggagtgggggtgaagacagcagacaagtggtaccgtatgggtctgcgcaccctcgaggatgttcgttccagcaagaccctgaagttgaccccgtggcagaaagtaggtctgctgtattatgaagatcttgctcgcggcgttacgcgtgccgaagctgacgcgatttggctgctggttcaggatgcagtcgcaactttcgacccggatgcgatcgtggagattgtcggtggatttcgtcgtgggaaacctcagggtcacgacgttgatctgcttatcagttctccgggagctgagaaagagcaagaagaccaactcctgcagaaagtgatgaatctgtggaagaaacaagggttgttgctgtgtggtcgtctggaatggagtcagtgggaagatgggggttcgccttccggtaaggctgatgagggtgacgcggaggcgtcgtgctttctgatcctcaaactttatgatcatctggtgcgtaaaagtaaacgcaatatgccgactggttcgaacatgggcgagtccaaaccgtggaaagcaattaaagtagatctgctgcgttgcccctatggcagttttgcgtttgcgatgttgcagtggaccggaagccgcatgttccgtcgtgatctgcgctggtacgccctggaagagaagaacatgatgctggacaatcattcgctgtatgacatgacccgcggtatcttcctccctgctaaatcggaagaggaaattttcgaacatctggggcttgaatacctggaaccgttcgaacgtaacgca

SEQ ID NO: 4420 - protein, 529 aa, synthetic construct
  REGION 1..529: note = Variant of terminal deoxynucleotidyltransferase
MHHHHHHGGSGSHGIRTIDSDFGKKQQKKGDNHDSSATYEIKFHEFVLFILEEKMGATRRTFLTDLARKKGFRVENELTDEVTHIVAENLSRSEVLAWLKEHKMEKTKQFELLDISWLIESMKVGKPVDTKGKYQLAESVEVSANPDPTEGRVNELPPTMKTVGPYACQRRTTLNNRNQRFTDSLEILRENYELKGNDDTALEFRRAISVLKSLPFEVRSLKDTEGLPWISDEVKGIMEEIIEVGESREVQAVLNDEWYQSFHAFTRVFGVGVKTADKWYRMGLRTLEDVRSSKTLKLTPWQKVGLLYYEDLARGVTRAEADAIWLLVQDAVATFDPDAIVEIVGGFRRGKPQGHDVDLLISSPGAEKEQEDQLLQKVMNLWKKQGLLLCGRLEWSQWEDGGSPSGKADEGDAEASCFLILKLYDHLVRKSKRNMPTGSNMGESKPWKAIKVDLLRCPYGSFAFAMLQWTGSRMFRRDLRWYALEEKNMMLDNHSLYDMTRGIFLPAKSEEEIFEHLGLEYLEPFERNA

SEQ ID NO: 4421 - DNA, 1587 bp, synthetic construct
  misc_feature 1..1587: note = Variant of terminal deoxynucleotidyltransferase
  source 1..1587: mol_type = other DNA
atgcaccatcatcatcatcatggcggtagcggcagccacggcattcgtaccatcgattcggacttcgggaagaaacagcagaaaaaaggcgataaccacgatagttccgccacttatgaaatcaaatttcacgagtttgtgctgttcattctcgaagaaaaaatgggtgcgacgcgtcgtacttttctgacagatttagcccgcaagaaagggttccgcgtcgagaatgaactgaccgacgaagttacccacatcgtggcagaaaatctgtcacgctctgaagtattggcttggctgaaagaacacaagatggagaagaccaagcaattcgaactgctggatattagctggcttatcgaaagcatgaaagttggtaaaccggtggacaccaaggggaaataccagttggcggaatcggttgaggtgagtgcgaacccagatccgacagaaggtcgtgtaaacgagctgcctcctactatgaaaaccgtttctccgtatgcgtgtcaacgccgcaccaccctgaacaaccgtaatcaacgttttacggactcgctggagattcttcgtgaaaattacgagctgaaaggcaacgacgatactgcgctggaatttcgtcgtgctatctccgtgctgaaaagccttccgtttgaggtacgtagcctgaaagacacggaaggattgccctggatcagtgatgaagtcaaagggattatggaagaaatcatcgaagtcggggagtcgcgtgaagtgcaggccgtgctcaatgatgagtggtatcaaagcttccacgcatttacgcgtgtctttggagtgggggtgaagacagcagacaagtggtaccgtatgggtctgcgcaccctcgaggatgttcgttccagcaagaccctgaagttgaccccgtggcagaaagtaggtctgctgtattatgaagatcttgctcgcggcgttacgcgtgccgaagctgacgcgatttggctgctggttcaggatgcagtcgcaactttcgacccggatgcgatcgtggagattgtcggtggatttcgtcgtgggaaacctcagggtcacgacgttgatctgcttatcagttctccgggagctgagaaagagcaagaagaccaactcctgcagaaagtgatgaatctgtggaagaaacaagggttgttgctgtgtggtcgtctggaagagagtcagtgggaagatgggggttcgccttccggtaaggctgatgagggtgacgcggaggcgtcgtgctttctgatcctcaaactttatgatcatctggtgcgtaaaagtaaacgcaatatgccgactggttcgaacatgggcgagtccaaaccgtggaaagcaattaaagtagatctgctgcgttgcccctatggcagttttgcgtttgcgatgttgcagtggaccggaagccgcatgttccgtcgtgatctgcgctggtacgccctggaagagaagaacatgatgctggacaatcattcgctgtatgacatgacccgcggtatcttcctccctgctaaatcggaagaggaaattttcgaacatctggggcttgaatacctggaaccgttcgaacgtaacgca

SEQ ID NO: 4422 - protein, 529 aa, synthetic construct
  REGION 1..529: note = Variant of terminal deoxynucleotidyltransferase
MHHHHHHGGSGSHGIRTIDSDFGKKQQKKGDNHDSSATYEIKFHEFVLFILEEKMGATRRTFLTDLARKKGFRVENELTDEVTHIVAENLSRSEVLAWLKEHKMEKTKQFELLDISWLIESMKVGKPVDTKGKYQLAESVEVSANPDPTEGRVNELPPTMKTVSPYACQRRTTLNNRNQRFTDSLEILRENYELKGNDDTALEFRRAISVLKSLPFEVRSLKDTEGLPWISDEVKGIMEEIIEVGESREVQAVLNDEWYQSFHAFTRVFGVGVKTADKWYRMGLRTLEDVRSSKTLKLTPWQKVGLLYYEDLARGVTRAEADAIWLLVQDAVATFDPDAIVEIVGGFRRGKPQGHDVDLLISSPGAEKEQEDQLLQKVMNLWKKQGLLLCGRLEESQWEDGGSPSGKADEGDAEASCFLILKLYDHLVRKSKRNMPTGSNMGESKPWKAIKVDLLRCPYGSFAFAMLQWTGSRMFRRDLRWYALEEKNMMLDNHSLYDMTRGIFLPAKSEEEIFEHLGLEYLEPFERNA

SEQ ID NO: 4423 - DNA, 1587 bp, synthetic construct
  misc_feature 1..1587: note = Variant of terminal deoxynucleotidyltransferase
  source 1..1587: mol_type = other DNA
atgcaccatcatcatcatcatggcggtagcggcagccacggcattcgtaccatcgattcggacttcgggaagaaacagcagaaaaaaggcgataaccacgatagttccgccacttatgaaatcaaatttcacgagtttgtgctgttcattctcgaagaaaaaatgggtgcgacgcgtcgtacttttctgacagatttagcccgcaagaaagggttccgcgtcgagaatgaactgaccgacgaagttacccacatcgtggcagaaaatctgtcacgctctgaagtattggcttggctgaaagaacacaagatggagaagaccaagcaattcgaactgctggatattagctggcttatcgaaagcatgaaagttggtaaaccggtggacaccaaggggaaataccagttggcggaatcggttgaggtgagtgcgaacccagatccgacagaaggtcgtgtaaacgagctgcctcctactatgaaaaccgtttctccgtatgcgtgtcaacgccgcaccaccctgaacaaccgtaatcaacgttttacggactcgctggagattcttcgtgaaaattacgagctgaaaggcaacgacgatactgcgctggaatttcgtcgtgctatctccgtgctgaaaagccttccgtttgaggtacgtagcctgaaagacacggaaggattgccctggatcagtgatgaagtcaaagggattatggaagaaatcatcgaagtcggggagtcgcgtgaagtgcaggccgtgctcaatgatgagtggtatcaaagcttccacgcatttacgcgtgtctttggagtgggggtgaagacagcagacaagtggtaccgtatgggtctgcgcaccctcgaggatgttcgttccagcaagaccctgaagttgaccccgtggcagaaagtaggtctgctgtattatgaagatcttgctcgcggcgttacgcgtgccgaagctgacgcgatttggctgctggttcaggatgcagtcgcaactttcgacccggatgcgatcgtggagattgtcggtggatttcgtcgtgggaaacctcagggtcacgacgttgatctgcttatcagttctccgggagctgagaaagagcaagaagaccaactcctgcagaaagtgatgaatctgtggaagaaacaagggttgttgctgtgtggtcgtctggaatggagtcagtgggaagatgggggttcgccttccggtaaggctgatgagggtgacgcggaggcgtcgtgctttctgatcctcaaactttatgatcatctggtgcgtaaaagtaaacgcaatatgccgactggttcgaacatgggcgagtccaaaccgtggaaagcaattaaagtagatctgctgcgttgcccctatggcagttttgcgtttgcgatgttgcagtggaccggaagccgcatgttccgtcgtgatctgcgctggtacgccctggaagagaagaacatgatgctggacaatcattcgctgtatgacatgacccgcggtatcttcctccctgctaaatcggaagaggggattttcgaacatctggggcttgaatacctggaaccgttcgaacgtaacgca

SEQ ID NO: 4424 - protein, 529 aa, synthetic construct
  REGION 1..529: note = Variant of terminal deoxynucleotidyltransferase
MHHHHHHGGSGSHGIRTIDSDFGKKQQKKGDNHDSSATYEIKFHEFVLFILEEKMGATRRTFLTDLARKKGFRVENELTDEVTHIVAENLSRSEVLAWLKEHKMEKTKQFELLDISWLIESMKVGKPVDTKGKYQLAESVEVSANPDPTEGRVNELPPTMKTVSPYACQRRTTLNNRNQRFTDSLEILRENYELKGNDDTALEFRRAISVLKSLPFEVRSLKDTEGLPWISDEVKGIMEEIIEVGESREVQAVLNDEWYQSFHAFTRVFGVGVKTADKWYRMGLRTLEDVRSSKTLKLTPWQKVGLLYYEDLARGVTRAEADAIWLLVQDAVATFDPDAIVEIVGGFRRGKPQGHDVDLLISSPGAEKEQEDQLLQKVMNLWKKQGLLLCGRLEWSQWEDGGSPSGKADEGDAEASCFLILKLYDHLVRKSKRNMPTGSNMGESKPWKAIKVDLLRCPYGSFAFAMLQWTGSRMFRRDLRWYALEEKNMMLDNHSLYDMTRGIFLPAKSEEGIFEHLGLEYLEPFERNA

SEQ ID NO: 4425 - DNA, 1587 bp, synthetic construct
  misc_feature 1..1587: note = Variant of terminal deoxynucleotidyltransferase
  source 1..1587: mol_type = other DNA
atgcaccatcatcatcatcatggcggtagcggcagccacggcattcgtaccatcgattcggacttcgggaagaaacagcagaaaaaaggcgataaccacgatagttccgccacttatgaaatcaaatttcacgagtttgtgctgttcattctcgaagaaaaaatgggtgcgacgcgtcgtacttttctgacagatttagcccgcaagaaagggttccgcgtcgagaatgaactgaccgacgaagttacccacatcgtggcagaaaatctgtcacgctctgaagtattggcttggctgaaagaacacaagatggagaagaccaagcaattcgaactgctggatattagctggcttatcgaaagcatgaaagttggtaaaccggtggacaccaaggggaaataccagttggcggaatcggttgaggtgagtgcgaacccagatccgacagaaggtcgtgtaaacgagctgcctcctactatgaaaaccgtttctccgtatgcgtgtcaacgccgcaccaccctgaacaaccgtaatcaacgttttacggactcgctggagattcttcgtgaaaattacgagctgaaaggcaacgacgatactgcgctggaatttcgtcgtgctatctccgtgctgaaaagccttccgtttgaggtacgtagcctgaaagacacggaaggattgccctggatcagtgatgaagtcaaagggattatggaagaaatcatcgaagtcggggagtcgcgtgaagtgcaggccgtgctcaatgatgagtggtatcaaagcttccacgcatttacgcgtgtctttggagtgggggtgaagacagcagacaagtggtaccgtatgggtctgcgcaccctcgaggatgttcgttccagcaagaccctgaagttgaccccgtggcagaaagtaggtctgctgtattatgaagatcttgctcgcggcgttacgcgtgccgaagctgacgcgatttggctgctggttcaggatgcagtcgcaactttcgacccggaagcgatcgtggagattgtcggtggatttcgtcgtgggaaacctcagggtcacgacgttgatctgcttatcagttctccgggagctgagaaagagcaagaagaccaactcctgcagaaagtgatgaatctgtggaagaaacaagggttgttgctgtgtggtcgtctggaatggagtcagtgggaagatgggggttcgccttccggtaaggctgatgagggtgacgcggaggcgtcgtgctttctgatcctcaaactttatgatcatctggtgcgtaaaagtaaacgcaatatgccgactggttcgaacatgggcgagtccaaaccgtggaaagcaattaaagtagatctgctgcgttgcccctatggcagttttgcgtttgcgatgttgcagtggaccggaagccgcatgttccgtcgtgatctgcgctggtacgccctggaagagaagaacatgatgctggacaatcattcgctgtatgacatgacccgcggtatcttcctccctgctaaatcggaagaggaaattttcgaacatctggggcttgaatacctggaaccgttcgaacgtaacgca

SEQ ID NO: 4426 - protein, 529 aa, synthetic construct
  REGION 1..529: note = Variant of terminal deoxynucleotidyltransferase
MHHHHHHGGSGSHGIRTIDSDFGKKQQKKGDNHDSSATYEIKFHEFVLFILEEKMGATRRTFLTDLARKKGFRVENELTDEVTHIVAENLSRSEVLAWLKEHKMEKTKQFELLDISWLIESMKVGKPVDTKGKYQLAESVEVSANPDPTEGRVNELPPTMKTVSPYACQRRTTLNNRNQRFTDSLEILRENYELKGNDDTALEFRRAISVLKSLPFEVRSLKDTEGLPWISDEVKGIMEEIIEVGESREVQAVLNDEWYQSFHAFTRVFGVGVKTADKWYRMGLRTLEDVRSSKTLKLTPWQKVGLLYYEDLARGVTRAEADAIWLLVQDAVATFDPEAIVEIVGGFRRGKPQGHDVDLLISSPGAEKEQEDQLLQKVMNLWKKQGLLLCGRLEWSQWEDGGSPSGKADEGDAEASCFLILKLYDHLVRKSKRNMPTGSNMGESKPWKAIKVDLLRCPYGSFAFAMLQWTGSRMFRRDLRWYALEEKNMMLDNHSLYDMTRGIFLPAKSEEEIFEHLGLEYLEPFERNA

SEQ ID NO: 4427 - DNA, 1587 bp, synthetic construct
  misc_feature 1..1587: note = Variant of terminal deoxynucleotidyltransferase
  source 1..1587: mol_type = other DNA
atgcaccatcatcatcatcatggcggtagcggcagccacggcattcgtaccatcgattcggacttcgggaagaaacagcagaaaaaaggcgataaccacgatagttccgccacttatgaaatcaaatttcacgagtttgtgctgttcattctcgaagaaaaaatgggtgcgacgcgtcgtacttttctgacagatttagcccgcaagaaagggttccgcgtcgagaatgaactgaccgacgaagttacccacatcgtggcagaaaatctgtcacgctctgaagtattggcttggctgaaagaacacaagatggagaagaccaagcaattcgaactgctggatattagctggcttatcgaaagcatgaaagttggtaaaccggtggacaccaaggggaaataccagttggcggaatcggttgaggtgagtgcgaacccagatccgacagaaggtcgtgtaaacgagctgcctcctactatgaaaaccgtttctccgtatgcgtgtcaacgccgcaccaccctgaacaaccgtaatcaacgttttacggactcgctggagattcttcgtgaaaattacgagctgaaaggcaacgacgatactgcgctggaatttcgtcgtgctatctccgtgctgaaaagccttccgtttgaggtacgtagcctgaaagacacggaaggattgccctggatcagtgatgaagtcaaagggattatggaagaaatcatcgaagtcggggagtcgcgtgaagtgcaggccgtgctcaatgatgagtggtatcaaagcttccacgcatttacgcgtgtctttggagtgggggtgaagacagcagacaagtggtaccgtatgggtctgcgcaccctcgaggatgttcgttccagcaagaccctgaagttgaccccgtggcagaaagtaggtctgctgtattatgaagatcttgctcgcggcgttacgcgtgccgaagctgacgcgatttggctgctggttcaggatgcagtcgcaactttcgacccggatgcgatcgtggagattgtcggtggatttcgtcgtgggaaacctcagggtcacgacgttgatctgcttatcagttctccgggagctgagaaagagcaagaagaccaactcctgcagaaagtgatgaatctgtggaagaaacaagggttgttgctgtgtggtcgtctggaatggagtcagtgggaagatgggggttcgccttccggtaaggctgatgagggtgacgcggaggcgtcgtgctttctgatcctcaaactttatgatcatctggtgcgtaaaagtaaacgcaatatgccgactggttcgaacatgggcgagtccaaaccgtggaaagcaattaaagtagatctgctgcgttgcccctatggcagttttgcgtttgcgatgttgcagtggaccggaagccgcatgttccgtcgtgatctgcgctggtacgccctggaagagaagaacatgatgctggacaatcattcgctgtatgacatgaccaatggtatcttcctccctgctaaatcggaagaggaaattttcgaacatctggggcttgaatacctggaaccgttcgaacgtaacgca

SEQ ID NO: 4428 - protein, 529 aa, synthetic construct
  REGION 1..529: note = Variant of terminal deoxynucleotidyltransferase
MHHHHHHGGSGSHGIRTIDSDFGKKQQKKGDNHDSSATYEIKFHEFVLFILEEKMGATRRTFLTDLARKKGFRVENELTDEVTHIVAENLSRSEVLAWLKEHKMEKTKQFELLDISWLIESMKVGKPVDTKGKYQLAESVEVSANPDPTEGRVNELPPTMKTVSPYACQRRTTLNNRNQRFTDSLEILRENYELKGNDDTALEFRRAISVLKSLPFEVRSLKDTEGLPWISDEVKGIMEEIIEVGESREVQAVLNDEWYQSFHAFTRVFGVGVKTADKWYRMGLRTLEDVRSSKTLKLTPWQKVGLLYYEDLARGVTRAEADAIWLLVQDAVATFDPDAIVEIVGGFRRGKPQGHDVDLLISSPGAEKEQEDQLLQKVMNLWKKQGLLLCGRLEWSQWEDGGSPSGKADEGDAEASCFLILKLYDHLVRKSKRNMPTGSNMGESKPWKAIKVDLLRCPYGSFAFAMLQWTGSRMFRRDLRWYALEEKNMMLDNHSLYDMTNGIFLPAKSEEEIFEHLGLEYLEPFERNA

SEQ ID NO: 4429 - DNA, 1587 bp, synthetic construct
  misc_feature 1..1587: note = Variant of terminal deoxynucleotidyltransferase
  source 1..1587: mol_type = other DNA
atgcaccatcatcatcatcatggcggtagcggcagccacggcattcgtaccatcgattcggacttcgggaagaaacagcagaaaaaaggcgataaccacgatagttccgccacttatgaaatcaaatttcacgagtttgtgctgttcattctcgaagaaaaaatgggtgcgacgcgtcgtacttttctgacagatttagcccgcaagaaagggttccgcgtcgagaatgaactgaccgacgaagttacccacatcgtggcagaaaatctgtcacgctctgaagtattggcttggctgaaagaacacaagatggagaagaccaagcaattcgaactgctggatattagctggcttatcgaaagcatgaaagttggtaaaccggtggacaccaaggggaaataccagttggcggaatcggttgaggtgagtgcgaacccagatccgacagaaggtcgtgtaaacgagctgcctcctactatgaaaaccgtttctccgtatgcgtgtcaacgccgcaccaccctgaacaaccgtaatcaacgttttacggactcgctggagattcttcgtgaaaattacgagctgaaaggcaacgacgatactgcgctggaatttcgtcgtgctatctccgtgctgaaaagccttccgtttgaggtacgtagcctgaaagacacggaaggattgccctggatcagtgatgaagtcaaagggattatggaagaaatcatcgaagtcggggagtcgcgtgaagtgcaggccgtgctcaatgatgagtggtatcaaagcttccacgcatttacgcgtgtctttggagtgggggtgaagacagcagacaagtggtaccgtatgggtctgcgcaccctcgaggatgttcgttccagcaagaccctgaagttgaccccgtggcagaaagtaggtctgctgtattatgaagatcttgctcgcggcgttacgcgtgccgaagctgacgcgatttggctgctggttcaggatgcagtcgcaactttcgacccggatgcgatcgtggagattgtcggtggatttcgtcgtgggaaacctcagggtcacgacgttgatctgcttatcagttctccgggagctgagaaagagcaagaagaccaactcctgcagaaagtgatgaatctgtggaagaaacaagggttgttgctgtgtggtcgtctggaagctagtcagtgggaagatgggggttcgccttccggtaaggctgatgagggtgacgcggaggcgtcgtgctttctgatcctcaaactttatgatcatctggtgcgtaaaagtaaacgcaatatgccgactggttcgaacatgggcgagtccaaaccgtggaaagcaattaaagtagatctgctgcgttgcccctatggcagttttgcgtttgcgatgttgcagtggaccggaagccgcatgttccgtcgtgatctgcgctggtacgccctggaagagaagaacatgatgctggacaatcattcgctgtatgacatgacccgcggtatcttcctccctgctaaatcggaagaggaaattttcgaacatctggggcttgaatacctggaaccgttcgaacgtaacgca

SEQ ID NO: 4430 - protein, 529 aa, synthetic construct
  REGION 1..529: note = Variant of terminal deoxynucleotidyltransferase
MHHHHHHGGSGSHGIRTIDSDFGKKQQKKGDNHDSSATYEIKFHEFVLFILEEKMGATRRTFLTDLARKKGFRVENELTDEVTHIVAENLSRSEVLAWLKEHKMEKTKQFELLDISWLIESMKVGKPVDTKGKYQLAESVEVSANPDPTEGRVNELPPTMKTVSPYACQRRTTLNNRNQRFTDSLEILRENYELKGNDDTALEFRRAISVLKSLPFEVRSLKDTEGLPWISDEVKGIMEEIIEVGESREVQAVLNDEWYQSFHAFTRVFGVGVKTADKWYRMGLRTLEDVRSSKTLKLTPWQKVGLLYYEDLARGVTRAEADAIWLLVQDAVATFDPDAIVEIVGGFRRGKPQGHDVDLLISSPGAEKEQEDQLLQKVMNLWKKQGLLLCGRLEASQWEDGGSPSGKADEGDAEASCFLILKLYDHLVRKSKRNMPTGSNMGESKPWKAIKVDLLRCPYGSFAFAMLQWTGSRMFRRDLRWYALEEKNMMLDNHSLYDMTRGIFLPAKSEEEIFEHLGLEYLEPFERNA

SEQ ID NO: 4431 - DNA, 1587 bp, synthetic construct
  misc_feature 1..1587: note = Variant of terminal deoxynucleotidyltransferase
  source 1..1587: mol_type = other DNA
atgcaccatcatcatcatcatggcggtagcggcagccacggcattcgtaccatcgattcggacttcgggaagaaacagcagaaaaaaggcgataaccacgatagttccgccacttatgaaatcaaatttcacgagtttgtgctgttcattctcgaagaaaaaatgggtgcgacgcgtcgtacttttctgacagatttagcccgcaagaaagggttccgcgtcgagaatgaactgaccgacgaagttacccacatcgtggcagaaaatctgtcacgctctgaagtattggcttggctgaaagaacacaagatggagaagaccaagcaattcgaactgctggatattagctggcttatcgaaagcatgaaagttggtaaaccggtggacaccaaggggaaataccagttggcggaatcggttgaggtgagtgcgaacccagatccgacagaaggtcgtgtaaacgagctgcctcctactatgaaaaccgtttctccgtatgcgtgtcaacgccgcaccaccctgaacaaccgtaatcaacgttttacggactcgctggagattcttcgtgaaaattacgagctgaaaggcaacgacgatactgcgctggaatttcgtcgtgctatctccgtgctgaaaagccttccgtttgaggtacgtagcctgaaagacacggaaggattgccctggatcagtgatgaagtcaaagggattatggaagaaatcatcgaagtcggggagtcgcgtgaagtgcaggccgtgctcaatgatgagtggtatcaaagcttccacgcatttacgcgtgtctttggagtgggggtgaagacagcagacaagtggtaccgtatgggtctgcgcaccctcgaggatgttcgttccagcaagaccctgaagttgaccccgtggcagaaagtaggtctgctgtattatgaagatcttgctcgcggcgttacgcgtgccgaagctgacgcgatttggctgctggttcaggatgcagtcgcaactttcgacccggatgcgatcgtggagattgtcggtggatttcgtcgtgggaaacctcagggtcacgacgttgatctgcttatcagttctccgggagctgagaaagagcaagaagaccaactcctgcagaaagtgatggggctgtggaagaaacaagggttgttgctgtgtggtcgtctggaatggagtcagtgggaagatgggggttcgccttccggtaaggctgatgagggtgacgcggaggcgtcgtgctttctgatcctcaaactttatgatcatctggtgcgtaaaagtaaacgcaatatgccgactggttcgaacatgggcgagtccaaaccgtggaaagcaattaaagtagatctgctgcgttgcccctatggcagttttgcgtttgcgatgttgcagtggaccggaagccgcatgttccgtcgtgatctgcgctggtacgccctggaagagaagaacatgatgctggacaatcattcgctgtatgacatgacccgcggtatcttcctccctgctaaatcggaagaggaaattttcgaacatctggggcttgaatacctggaaccgttcgaacgtaacgca

SEQ ID NO: 4432 - protein, 529 aa, synthetic construct
  REGION 1..529: note = Variant of terminal deoxynucleotidyltransferase
MHHHHHHGGSGSHGIRTIDSDFGKKQQKKGDNHDSSATYEIKFHEFVLFILEEKMGATRRTFLTDLARKKGFRVENELTDEVTHIVAENLSRSEVLAWLKEHKMEKTKQFELLDISWLIESMKVGKPVDTKGKYQLAESVEVSANPDPTEGRVNELPPTMKTVSPYACQRRTTLNNRNQRFTDSLEILRENYELKGNDDTALEFRRAISVLKSLPFEVRSLKDTEGLPWISDEVKGIMEEIIEVGESREVQAVLNDEWYQSFHAFTRVFGVGVKTADKWYRMGLRTLEDVRSSKTLKLTPWQKVGLLYYEDLARGVTRAEADAIWLLVQDAVATFDPDAIVEIVGGFRRGKPQGHDVDLLISSPGAEKEQEDQLLQKVMGLWKKQGLLLCGRLEWSQWEDGGSPSGKADEGDAEASCFLILKLYDHLVRKSKRNMPTGSNMGESKPWKAIKVDLLRCPYGSFAFAMLQWTGSRMFRRDLRWYALEEKNMMLDNHSLYDMTRGIFLPAKSEEEIFEHLGLEYLEPFERNA

SEQ ID NO: 4433 - DNA, 1587 bp, synthetic construct
  misc_feature 1..1587: note = Variant of terminal deoxynucleotidyltransferase
  source 1..1587: mol_type = other DNA
atgcaccatcatcatcatcatggcggtagcggcagccacggcattcgtaccatcgattcggacttcgggaagaaacagcagaaaaaaggcgataaccacgatagttccgccacttatgaaatcaaatttcacgagtttgtgctgttcattctcgaagaaaaaatgggtgcgacgcgtcgtacttttctgacagatttagcccgcaagaaagggttccgcgtcgagaatgaactgaccgacgaagttacccacatcgtggcagaaaatctgtcacgctctgaagtattggcttggctgaaagaacacaagatggagaagaccaagcaattcgaactgctggatattagctggcttatcgaaagcatgaaagttggtaaaccggtggacaccaaggggaaataccagttggcggaatcggttgaggtgagtgcgaacccagatccgacagaaggtcgtgtaaacgagctgcctcctactatgaaaaccgtttctccgtatgcgtgtcaacgccgcaccaccctgaacaaccgtaatcaacgttttacggactcgctggagattcttcgtgaaaattacgagctgaaaggcaacgacgatactgcgctggaatttcgtcgtgctatctccgtgctgaaaagccttccgtttgaggtacgtagcctgaaagacacggaaggattgccctggatcagtgatgaagtcaaagggattatggaagaaatcatcgaagtcggggagtcgcgtgaagtgcaggccgtgctcaatgatgagtggtatcaaagcttccacgcatttacgcgtgtctttggagtgggggtgaagacagcagacaagtggtaccgtatgggtctgcgcaccctcgaggatgttcgttccagcaagaccctgaagttgaccccgtggcagaaagtaggtctgctgtattatgaagatcttgctcgcggcgttacgcgtgccgaagctgacgcgatttggctgctggttcaggatgcagtcgcaactttcgacccggatgcgatcgtggagattgtcggtggatttcgtcgtgggaaacctcagggtcacgacgttgatctgcttatcagttctccgggagctgagaaagagcaagaagaccaactcctgcagaaagtgatgaatctgtggaagaaacaagggttgttgctgtgtggtcgtctggaatggagtcagtgggaagatgggggttcgccttccggtaaggctgatgagggtgacgcggaggcgtcgtgctttctgatcctcaaactttatgatcatctggtgcgtaaaagtaaacgcaatatgccgactggttcgaacatgggcgagtccaaaccgtggaaagcaattaaagtagatctgctgcgttgcccctatggcagttttgcgtttgcgatgttgcagtggaccggaagccgcatgttccgtcgtgatctgcgctggtacgccctggaagagaagaacatgatgctggacaatcattcgctgtatgacatgacccgcggtatcttcctccctgctaaatcggaagaggaaattttcgaaactctggggcttgaatacctggaaccgttcgaacgtaacgca

SEQ ID NO: 4434 - protein, 529 aa, synthetic construct
  REGION 1..529: note = Variant of terminal deoxynucleotidyltransferase
MHHHHHHGGSGSHGIRTIDSDFGKKQQKKGDNHDSSATYEIKFHEFVLFILEEKMGATRRTFLTDLARKKGFRVENELTDEVTHIVAENLSRSEVLAWLKEHKMEKTKQFELLDISWLIESMKVGKPVDTKGKYQLAESVEVSANPDPTEGRVNELPPTMKTVSPYACQRRTTLNNRNQRFTDSLEILRENYELKGNDDTALEFRRAISVLKSLPFEVRSLKDTEGLPWISDEVKGIMEEIIEVGESREVQAVLNDEWYQSFHAFTRVFGVGVKTADKWYRMGLRTLEDVRSSKTLKLTPWQKVGLLYYEDLARGVTRAEADAIWLLVQDAVATFDPDAIVEIVGGFRRGKPQGHDVDLLISSPGAEKEQEDQLLQKVMNLWKKQGLLLCGRLEWSQWEDGGSPSGKADEGDAEASCFLILKLYDHLVRKSKRNMPTGSNMGESKPWKAIKVDLLRCPYGSFAFAMLQWTGSRMFRRDLRWYALEEKNMMLDNHSLYDMTRGIFLPAKSEEEIFETLGLEYLEPFERNA

SEQ ID NO: 4435 - DNA, 1587 bp, synthetic construct
  misc_feature 1..1587: note = Variant of terminal deoxynucleotidyltransferase
  source 1..1587: mol_type = other DNA
atgcaccatcatcatcatcatggcggtagcggcagccacggcattcgtaccatcgattcggacttcgggaagaaacagcagaaaaaaggcgataaccacgatagttccgccacttatgaaatcaaatttcacgagtttgtgctgttcattctcgaagaaaaaatgggtgcgacgcgtcgtacttttctgacagatttagcccgcaagaaagggttccgcgtcgagaatgaactgaccgacgaagttacccacatcgtggcagaaaatctgtcacgctctgaagtattggcttggctgaaagaacacaagatggagaagaccaagcaattcgaactgctggatattagctggcttatcgaaagcatgaaagttggtaaaccggtggacaccaaggggaaataccagttggcggaatcggttgaggtgagtgcgaacccagatccgacagaaggtcgtgtaaacgagctgcctcctactatgaaaaccgtttctccgtatgcgtgtcaacgccgcaccaccctgaacaaccgtaatcaacgttttacggactcgctggagattcttcgtgaaaattacgagctgaaaggcaacgacgatactgcgctgcgttttcgtcgtgctatctccgtgctgaaaagccttccgtttgaggtacgtagcctgaaagacacggaaggattgccctggatcagtgatgaagtcaaagggattatggaagaaatcatcgaagtcggggagtcgcgtgaagtgcaggccgtgctcaatgatgagtggtatcaaagcttccacgcatttacgcgtgtctttggagtgggggtgaagacagcagacaagtggtaccgtatgggtctgcgcaccctcgaggatgttcgttccagcaagaccctgaagttgaccccgtggcagaaagtaggtctgctgtattatgaagatcttgctcgcggcgttacgcgtgccgaagctgacgcgatttggctgctggttcaggatgcagtcgcaactttcgacccggatgcgatcgtggagattgtcggtggatttcgtcgtgggaaacctcagggtcacgacgttgatctgcttatcagttctccgggagctagtaaagagcaagaagaccaactcctgcagaaagtgatgaatctgtggaagaaacaagggttgttgctgtgtggtcgtctggaatggagtcagtgggaagatgggggttcgccttccggtaaggctgatgagggtgacgcggaggcgtcgtgctttctgatcctcaaactttatgatcatctggtgcgtaaaagtaaacgcaatatgccgactggttcgaacatgggcgagtccaaaccgtggaaagcaattaaagtagatctgctgcgttgcccccgcggcagttttgcgtttgcgatgttgcagtggaccggaagccgcatgttccgtcgtgatctgcgctggtacgccctggaagagaagaacatgatgctggacaatcattcgctgtatgacatgacccgcggtatcttcctccctgctaaatcggaagaggaaattttcgaacatctggggcttgaatacctggaaccgttcgaacgtaacgca

SEQ ID NO: 4436 - protein, 529 aa, synthetic construct
  REGION 1..529: note = Variant of terminal deoxynucleotidyltransferase
MHHHHHHGGSGSHGIRTIDSDFGKKQQKKGDNHDSSATYEIKFHEFVLFILEEKMGATRRTFLTDLARKKGFRVENELTDEVTHIVAENLSRSEVLAWLKEHKMEKTKQFELLDISWLIESMKVGKPVDTKGKYQLAESVEVSANPDPTEGRVNELPPTMKTVSPYACQRRTTLNNRNQRFTDSLEILRENYELKGNDDTALRFRRAISVLKSLPFEVRSLKDTEGLPWISDEVKGIMEEIIEVGESREVQAVLNDEWYQSFHAFTRVFGVGVKTADKWYRMGLRTLEDVRSSKTLKLTPWQKVGLLYYEDLARGVTRAEADAIWLLVQDAVATFDPDAIVEIVGGFRRGKPQGHDVDLLISSPGASKEQEDQLLQKVMNLWKKQGLLLCGRLEWSQWEDGGSPSGKADEGDAEASCFLILKLYDHLVRKSKRNMPTGSNMGESKPWKAIKVDLLRCPRGSFAFAMLQWTGSRMFRRDLRWYALEEKNMMLDNHSLYDMTRGIFLPAKSEEEIFEHLGLEYLEPFERNA

SEQ ID NO: 4437 - DNA, 1587 bp, synthetic construct
  misc_feature 1..1587: note = Variant of terminal deoxynucleotidyltransferase
  source 1..1587: mol_type = other DNA
atgcaccatcatcatcatcatggcggtagcggcagccacggcattcgtaccatcgattcggacttcgggaagaaacagcagaaaaaaggcgataaccacgatagttccgccacttatgaaatcaaatttcacgagtttgtgctgttcattctcgaagaaaaaatgggtgcgacgcgtcgtacttttctgacagatttagcccgcaagaaagggttccgcgtcgagaatgaactgaccgacgaagttacccacatcgtggcagaaaatctgtcacgctctgaagtattggcttggctgaaagaacacaagatggagaagaccaagcaattcgaactgctggatattagctggcttatcgaaagcatgaaagttggtaaaccggtggacaccaaggggaaataccagttggcggaatcggttgaggtgagtgcgaacccagatccgacagaaggtcgtgtaaacgagctgcctcctactatgaaaaccgtttctccgtatgcgtgtcaacgccgcaccaccctgaacaaccgtaatcaacgttttacggacgctctggagattcttcgtgaaaattacgagctgaaaggcaacgacgatactgcgctggaatttcgtcgtgctatctccgtgctgaaaagccttccgtttgaggtacgtagcctgaaagacacggaaggattgccctggatcagtgatgaagtcaaagggattatggaagaaatcatcgaagtcggggagtcgcgtgaagtgcaggccgtgctcaatgatgagtggtatcaaagcttccacgcatttacgcgtgtctttggagtgggggtgaagacagcagacaagtggtaccgtatgggtctgcgcaccctcgaggatgttcgttccagcaagaccctgaagttgaccccgtggcagaaagtaggtctgctgtattatgaagatcttgctcgcggcgttacgcgtgccgaagctgacgcgatttggctgctggttcaggatgcagtcgcaactttcgacccggatgcgatcgtggagattgtcggtggatttcgtcgtgggaaacctcagggtcacgacgttgatctgcttatcagttctccgggagctgagaaagagcaagaagaccaactcctgcagaaagtgatgaatctgtggaagaaacaagggttgttgctgtgtggtcgtctggaatggagtcagtgggaagatgggggttcgccttccggtaaggctgatgagggtgacgcggaggcgtcgtgctttctgatcctcaaactttatgatcatctggtgcgtaaaagtaaacgcaatatgccgactggttcgaacatgggcgagtccaaaccgtggaaagcaattaaagtagatctgctgcgttgcccctatggcagttttgcgtttgcgatgttgcagtggaccggaagccgcatgttccgtcgtgatctgcgctggtacgccctggaagagaagaacatgatgctggacaatcattcgctgtatgacatgacccgcggtatcttcctccctgctaaatcggaagaggaaattttcgaacatctggggcttgaatacctggaaccgttcgaacgtaacgca

SEQ ID NO: 4438 - protein, 529 aa, synthetic construct
  REGION 1..529: note = Variant of terminal deoxynucleotidyltransferase
MHHHHHHGGSGSHGIRTIDSDFGKKQQKKGDNHDSSATYEIKFHEFVLFILEEKMGATRRTFLTDLARKKGFRVENELTDEVTHIVAENLSRSEVLAWLKEHKMEKTKQFELLDISWLIESMKVGKPVDTKGKYQLAESVEVSANPDPTEGRVNELPPTMKTVSPYACQRRTTLNNRNQRFTDALEILRENYELKGNDDTALEFRRAISVLKSLPFEVRSLKDTEGLPWISDEVKGIMEEIIEVGESREVQAVLNDEWYQSFHAFTRVFGVGVKTADKWYRMGLRTLEDVRSSKTLKLTPWQKVGLLYYEDLARGVTRAEADAIWLLVQDAVATFDPDAIVEIVGGFRRGKPQGHDVDLLISSPGAEKEQEDQLLQKVMNLWKKQGLLLCGRLEWSQWEDGGSPSGKADEGDAEASCFLILKLYDHLVRKSKRNMPTGSNMGESKPWKAIKVDLLRCPYGSFAFAMLQWTGSRMFRRDLRWYALEEKNMMLDNHSLYDMTRGIFLPAKSEEEIFEHLGLEYLEPFERNA

SEQ ID NO: 4439 - DNA, 1584 bp, synthetic construct
  misc_feature 1..1584: note = Variant of terminal deoxynucleotidyltransferase
  source 1..1584: mol_type = other DNA
atgcaccatcatcatcatggcggtagcggcagccacggcattcgtaccatcgattcggacttcgggaagaaacagcagaaaaaaggcgataaccacgatagttccgccacttatgaaatcaaatttcacgagtttgtgctgttcattctcgaagaaaaaatgggtgcgacgcgtcgtacttttctgacagatttagcccgcaagaaagggttccgcgtcgagaatgaactgaccgacgaagttacccacatcgtggcagaaaatctgtcacgctctgaagtattggcttggctgaaagaacacaagatggagaagaccaagcaattcgaactgctggatattagctggcttatcgaaagcatgaaagttggtaaaccggtggacaccaaggggaaataccagttggcggaatcggttgaggtgagtgcgaacccagatccgacagaaggtcgtgtaaacgagctgcctcctactatgaaaaccgtttctccgtatgcgtgtcaacgccgcaccaccctgaacaaccgtaatcaacgttttacggactcgctggagattcttcgtgaaaattacgagctgaaaggcaacgacgatactgcgctggaatttcgtcgtgctatctccgtgctgaaaagccttccgtttgaggtacgtagcctgaaagacacggaaggattgccctggatcagtgatgaagtcaaagggattatggaagaaatcatcgaagtcggggagtcgcgtgaagtgcaggccgtgctcaatgatgagtggtatcaaagcttccacgcatttacgcgtgtctttggagtgggggtgaagacagcagacaagtggtaccgtatgggtctgcgcaccctcgaggatgttcgttccagcaagaccctgaagttgaccccgtggcagaaagtaggtctgctgtattatgaagatcgtgctcgcggcgttacgcgtgccgaagctgacgcgatttggctgctggttcaggatgcagtcgcaactttcgacccggatgcgatcgtggagattgtcggtggatttcgtcgtgggaaacctcagggtcacgacgttgatctgcttatcagttctccgggagctgaaaaagagcaagaagaccaactcctgcagaaagtgatgaatctgtggaagaaacaagggttgttgctgtgtggtcgtctggaatggagtcagtgggaatgggggggttcgccttccggtaaggctgatgagggtgacgcggaggcgtcgtgctttctgatcctcaaactttatgatcatctggtgcgtaaaagtaaacgcaatatgccgactggttcgaacatgggcgagtccaaaccgtggaaagcaattaaagtagatctgctgcgttgcccccgcggcagttttgcgtttgcgatgttgcagtggaccggaagccgcatgttccgtcgtgatctgcgctggtacgccctggaagagaagaacatgatgctggacaatcattcgctgtatgacatgactcgtggtatccaactccctgctaaatcggaagaggaaattttcgaacatctggggcttgaatacctggaaccgttcgaacgtaacgca

SEQ ID NO: 4440 - protein, 528 aa, synthetic construct
  REGION 1..528: note = Variant of terminal deoxynucleotidyltransferase
MHHHHHGGSGSHGIRTIDSDFGKKQQKKGDNHDSSATYEIKFHEFVLFILEEKMGATRRTFLTDLARKKGFRVENELTDEVTHIVAENLSRSEVLAWLKEHKMEKTKQFELLDISWLIESMKVGKPVDTKGKYQLAESVEVSANPDPTEGRVNELPPTMKTVSPYACQRRTTLNNRNQRFTDSLEILRENYELKGNDDTALEFRRAISVLKSLPFEVRSLKDTEGLPWISDEVKGIMEEIIEVGESREVQAVLNDEWYQSFHAFTRVFGVGVKTADKWYRMGLRTLEDVRSSKTLKLTPWQKVGLLYYEDRARGVTRAEADAIWLLVQDAVATFDPDAIVEIVGGFRRGKPQGHDVDLLISSPGAEKEQEDQLLQKVMNLWKKQGLLLCGRLEWSQWEWGGSPSGKADEGDAEASCFLILKLYDHLVRKSKRNMPTGSNMGESKPWKAIKVDLLRCPRGSFAFAMLQWTGSRMFRRDLRWYALEEKNMMLDNHSLYDMTRGIQLPAKSEEEIFEHLGLEYLEPFERNA

SEQ ID NO: 4441 - DNA, 1584 bp, synthetic construct
  misc_feature 1..1584: note = Variant of terminal deoxynucleotidyltransferase
  source 1..1584: mol_type = other DNA
atgcaccatcatcatcatggcggtagcggcagccacggcattcgtaccatcgattcggacttcgggaagaaacagcagaaaaaaggcgataaccacgatagttccgccacttatgaaatcaaatttcacgagtttgtgctgttcattctcgaagaaaaaatgggtgcgacgcgtcgtacttttctgacagatttagcccgcaagaaagggttccgcgtcgagaatgaactgaccgacgaagttacccacatcgtggcagaaaatctgtcacgctctgaagtattggcttggctgaaagaacacaagatggagaagaccaagcaattcgaactgctggatattagctggcttatcgaaagcatgaaagttggtaaaccggtggacaccaaggggaaataccagttggcggaatcggttgaggtgagtgcgaacccagatccgacagaaggtcgtgtaaacgagctgcctcctactatgaaaaccgtttctccgtatgcgtgtcaacgccgcaccaccctgaacaaccgtaatcaacgttttacggactcgctggagattcttcgtgaaaattacgagctgaaaggcaacgacgatactgcgctggaatttcgtcgtgctatctccgtgctgaaaagccttccgtttgaggtacgtagcctgaaagacacggaaggattgccctggatcagtgatgaagtcaaagggattatggaagaaatcatcgaagtcggggagtcgcgtgaagtgcaggccgtgctcaatgatgagtggtatcaaagcttccacgcatttacgcgtgtctttggagtgggggtgaagacagcagacaagtggtaccgtatgggtctgcgcaccctcgaggatgttcgttccagcaagaccctgaagttgaccccgtggcagaaagtaggtctgctgtattatgaagatcttgctcgcggcgttacgcgtgccgaagctgacgcgatttggctgctggttcaggatgcagtcgcaactttcgacccggatgcgatcgtggagattgtcggtggacagcgtcgtgggaaacctcagggtcacgacgttgatctgcttatcagttctccgggagctgaaaaagagcaagaagaccaactcctgcagaaagtgatgaatctgtggaagaaacaagggttgttgctgtgtggtcgtctggaatggagtcagtgggaatgggggggttcgccttccggtaaggctgatgagggtgacgcggaggcgtcgtgctttctgatcctcaaactttatgatcatctggtgcgtaaaagtaaacgcaatatgccgactggttcgaacatgggcgagtccaaaccgtggaaagcaattaaagtagatctgctgcgttgcccccgcggcagttttgcgtttgcgatgttgcagtggaccggaagccgcatgttccgtcgtgatctgcgctggtacgccctggaagagaagaacatgatgctggacaatcattcgctgtatgacatgactcgtggtatccaactccctgctaaatcggaagaggaaattttcgaacatctggggcttgaatacctggaaccgttcgaacgtaacgca

SEQ ID NO: 4442 - protein, 528 aa, synthetic construct
  REGION 1..528: note = Variant of terminal deoxynucleotidyltransferase
MHHHHHGGSGSHGIRTIDSDFGKKQQKKGDNHDSSATYEIKFHEFVLFILEEKMGATRRTFLTDLARKKGFRVENELTDEVTHIVAENLSRSEVLAWLKEHKMEKTKQFELLDISWLIESMKVGKPVDTKGKYQLAESVEVSANPDPTEGRVNELPPTMKTVSPYACQRRTTLNNRNQRFTDSLEILRENYELKGNDDTALEFRRAISVLKSLPFEVRSLKDTEGLPWISDEVKGIMEEIIEVGESREVQAVLNDEWYQSFHAFTRVFGVGVKTADKWYRMGLRTLEDVRSSKTLKLTPWQKVGLLYYEDLARGVTRAEADAIWLLVQDAVATFDPDAIVEIVGGQRRGKPQGHDVDLLISSPGAEKEQEDQLLQKVMNLWKKQGLLLCGRLEWSQWEWGGSPSGKADEGDAEASCFLILKLYDHLVRKSKRNMPTGSNMGESKPWKAIKVDLLRCPRGSFAFAMLQWTGSRMFRRDLRWYALEEKNMMLDNHSLYDMTRGIQLPAKSEEEIFEHLGLEYLEPFERNA

SEQ ID NO: 4443 - DNA, 1584 bp, synthetic construct
  misc_feature 1..1584: note = Variant of terminal deoxynucleotidyltransferase
  source 1..1584: mol_type = other DNA
atgcaccatcatcatcatggcggtagcggcagccacggcattcgtaccatcgattcggacttcgggaagaaacagcagaaaaaaggcgataaccacgatagttccgccacttatgaaatcaaatttcacgagtttgtgctgttcattctcgaagaaaaaatgggtgcgacgcgtcgtacttttctgacagatttagcccgcaagaaagggttccgcgtcgagaatgaactgaccgacgaagttacccacatcgtggcagaaaatctgtcacgctctgaagtattggcttggctgaaagaacacaagatggagaagaccaagcaattcgaactgctggatattagctggcttatcgaaagcatgaaagttggtaaaccggtggacaccaaggggaaataccagttggcggaatcggttgaggtgagtgcgaacccagatccgacagaaggtcgtgtaaacgagctgcctcctactatgaaaaccgtttctccgtatgcgtgtcaacgccgcaccaccctgaacaaccgtaatcaacgttttacggactcgctggagattcttcgtgaaaattacgagctgaaaggcaacgacgatactgcgctggaatttcgtcgtgctatctccgtgctgaaaagccttccgtttgaggtacgtagcctgaaagacacggaaggattgccctggatcagtgatgaagtcaaagggattatggaagaaatcatcgaagtcggggagtcgcgtgaagtgcaggccgtgctcaatgatgagtggtatcaaagcttccacgcatttacgcgtgtctttggagtgggggtgaagacagcagacaagtggtaccgtatgggtctgcgcaccctcgaggatgttcgttccagcaagaccctgaagttgaccccgtggcagaaagtaggtctgctgtattatgaagatcttgctcgcggcgttacgcgtgccgaagctgacgcgatttggctgctggttcaggatgcagtcgcaactttcgacccggatgcgatcgtggagattgtcggtggatttcgtcgtgggaaacctcagggtcacgacgttgatctgcttatcagttctccgggagctgaaaaagagcaagaagaccaactcctgcagaaagtgatgaatctgtggaagaaacaagggttgttgctgtgtggtcgtctggaatggagtcagtgggaatgggggggttcgccttccggtaaggctgatgagggtgacgcggaggcgtcgtgctttctgatcctcaaactttatgatcatctggtgcgtaaaagtaaacgcaatatgccgactggttcgaacatgggcgagtccaaaccgtggaaagcaattaaagtagatctgctgcgttgcccccgcggcagttttgcgtttgcgatgttgcagtggaccggaagctctatgttccgtcgtgatctgcgctggtacgccctggaagagaagaacatgatgctggacaatcattcgctgtatgaccctagtcgtggtatcggtctccctgctaaatcggaagaggaaattttcgaacatctggggcttgaatacctggaaccgttcgaacgtaacgca

SEQ ID NO: 4444 - protein, 528 aa, synthetic construct
  REGION 1..528: note = Variant of terminal deoxynucleotidyltransferase
MHHHHHGGSGSHGIRTIDSDFGKKQQKKGDNHDSSATYEIKFHEFVLFILEEKMGATRRTFLTDLARKKGFRVENELTDEVTHIVAENLSRSEVLAWLKEHKMEKTKQFELLDISWLIESMKVGKPVDTKGKYQLAESVEVSANPDPTEGRVNELPPTMKTVSPYACQRRTTLNNRNQRFTDSLEILRENYELKGNDDTALEFRRAISVLKSLPFEVRSLKDTEGLPWISDEVKGIMEEIIEVGESREVQAVLNDEWYQSFHAFTRVFGVGVKTADKWYRMGLRTLEDVRSSKTLKLTPWQKVGLLYYEDLARGVTRAEADAIWLLVQDAVATFDPDAIVEIVGGFRRGKPQGHDVDLLISSPGAEKEQEDQLLQKVMNLWKKQGLLLCGRLEWSQWEWGGSPSGKADEGDAEASCFLILKLYDHLVRKSKRNMPTGSNMGESKPWKAIKVDLLRCPRGSFAFAMLQWTGSSMFRRDLRWYALEEKNMMLDNHSLYDPSRGIGLPAKSEEEIFEHLGLEYLEPFERNA

SEQ ID NO: 4445 - DNA, 1584 bp, synthetic construct
  misc_feature 1..1584: note = Variant of terminal deoxynucleotidyltransferase
  source 1..1584: mol_type = other DNA
atgcaccatcatcatcatggcggtagcggcagccacggcattcgtaccatcgattcggacttcgggaagaaacagcagaaaaaaggcgataaccacgatagttccgccacttatgaaatcaaatttcacgagtttgtgctgttcattctcgaagaaaaaatgggtgcgacgcgtcgtacttttctgacagatttagcccgcaagaaagggttccgcgtcgagaatgaactgaccgacgaagttacccacatcgtggcagaaaatctgtcacgctctgaagtattggcttggctgaaagaacacaagatggagaagaccaagcaattcgaactgctggatattagctggcttatcgaaagcatgaaagttggtaaaccggtggacaccaaggggaaataccagttggcggaatcggttgaggtgagtgcgaacccagatccgacagaaggtcgtgtaaacgagctgcctcctactatgaaaaccgtttctccgtatgcgtgtcaacgccgcaccaccctgaacaaccgtaatcaacgttttacggactcgctggagattcttcgtgaaaattacgagctgaaaggcaacgacgatactgcgctggaatttcgtcgtgctatctccgtgctgaaaagccttccgtttgaggtacgtagcctgaaagacacggaaggattgccctggatcagtgatgaagtcaaagggattatggaagaaatcatcgaagtcggggagtcgcgtgaagtgcaggccgtgctcaatgatgagtggtatcaaagcttccacgcatttacgcgtgtctttggagtgggggtgaagacagcagacaagtggtaccgtatgggtctgcgcaccctcgaggatgttcgttccagcaagaccctgaagttgaccccgtggcagaaagtaggtctgctgtattatgaagatcttgctcgcggcgttacgcgtgccgaagctgacgcgatttggctgctggttcaggatgcagtcgcaactttcgacccggatgcgatcgtggagattgtcggtggatttcgtcgtgggaaacctcagggtcacgacgttgatctgcttatcagttctccgggagctgaaaaagagcaagaagaccaactcctgcagaaagtgatgaatctgtggaagaaacaagggttgttgctgtgtggtcgtctggaatggagtcagtgggaatgggggggttcgccttccggtaaggctgatgagggtgacgcggaggcgtcgtgctttctgatcctcaaactttatgatcatctggtgcgtaaaagtaaacgcaatatgccgactggttcgaacatgggcgagtccaaaccgtggaaagcaattaaagtagatctgctgcgttgcccccgcggcagttttgcgtttgcgatgttgcagtggaccggaagcggtatgttccgtcgtgatctgcgctggtacgccctggaagagaagaacatgatgctggacaatcattcgctgtatgaccctagtcgtggtatcggtctccctgctaaatcggaagaggaaattttcgaacatctggggcttgaatacctggaaccgttcgaacgtaacgca

SEQ ID NO: 4446 - protein, 528 aa, synthetic construct
  REGION 1..528: note = Variant of terminal deoxynucleotidyltransferase
MHHHHHGGSGSHGIRTIDSDFGKKQQKKGDNHDSSATYEIKFHEFVLFILEEKMGATRRTFLTDLARKKGFRVENELTDEVTHIVAENLSRSEVLAWLKEHKMEKTKQFELLDISWLIESMKVGKPVDTKGKYQLAESVEVSANPDPTEGRVNELPPTMKTVSPYACQRRTTLNNRNQRFTDSLEILRENYELKGNDDTALEFRRAISVLKSLPFEVRSLKDTEGLPWISDEVKGIMEEIIEVGESREVQAVLNDEWYQSFHAFTRVFGVGVKTADKWYRMGLRTLEDVRSSKTLKLTPWQKVGLLYYEDLARGVTRAEADAIWLLVQDAVATFDPDAIVEIVGGFRRGKPQGHDVDLLISSPGAEKEQEDQLLQKVMNLWKKQGLLLCGRLEWSQWEWGGSPSGKADEGDAEASCFLILKLYDHLVRKSKRNMPTGSNMGESKPWKAIKVDLLRCPRGSFAFAMLQWTGSGMFRRDLRWYALEEKNMMLDNHSLYDPSRGIGLPAKSEEEIFEHLGLEYLEPFERNA

SEQ ID NO: 4447 - DNA, 1584 bp, synthetic construct
  misc_feature 1..1584: note = Variant of terminal deoxynucleotidyltransferase
  source 1..1584: mol_type = other DNA
atgcaccatcatcatcatggcggtagcggcagccacggcattcgtaccatcgattcggacttcgggaagaaacagcagaaaaaaggcgataaccacgatagttccgccacttatgaaatcaaatttcacgagtttgtgctgttcattctcgaagaaaaaatgggtgcgacgcgtcgtacttttctgacagatttagcccgcaagaaagggttccgcgtcgagaatgaactgaccgacgaagttacccacatcgtggcagaaaatctgtcacgctctgaagtattggcttggctgaaagaacacaagatggagaagaccaagcaattcgaactgctggatattagctggcttatcgaaagcatgaaagttggtaaaccggtggacaccaaggggaaataccagttggcggaatcggttgaggtgagtgcgaacccagatccgacagaaggtcgtgtaaacgagctgcctcctactatgaaaaccgtttctccgtatgcgtgtcaacgccgcaccaccctgaacaaccgtaatcaacgttttacggactcgctggagattcttcgtgaaaattacgagctgaaaggcaacgacgatactgcgctggaatttcgtcgtgctatctccgtgctgaaaagccttccgtttgaggtacgtagcctgaaagacacggaaggattgccctggatcagtgatgaagtcaaagggattatggaagaaatcatcgaagtcggggagtcgcgtgaagtgcaggccgtgctcaatgatgagtggtatcaaagcttccacgcatttacgcgtgtctttggagtgggggtgaagacagcagacaagtggtaccgtatgggtctgcgcaccctcgaggatgttcgttccagcaagaccctgaagttgaccccgtggcagaaagtaggtctgctgtattatgaagatcttgctcgcggcgttacgcgtgccgaagctgacgcgatttggctgctggttcaggatgcagtcgcaactttcgacccggatgcgatcgtggagattgtcggtggatttcgtcgtgggaaacctcagggtcacgacgttgatctgcttatcagttctccgggagctgaaaaagagcaagaagaccaactcctgcagaaagtgatgaatctgtggaagaaacaagggttgttgctgtgtggtcgtctggaatggagtcagtgggaatgggggggttcgccttccggtaaggctgatgagggtgacgcggaggcgtcgtgctttctgatcctcaaactttatgatcatctggtgcgtaaaagtaaacgcaatatgccgactggttcgaacatgggcgagtccaaaccgtggaaagcaattaaagtagatctgctgcgttgcccccgcggcagttttgcgtttgcgatgttgcagtggaccggaaatcgcatgttccgtcgtgatctgcgctggtacgccctggaagagaagaacatgatgctggacaatcattcgctgtatgacatgactcgtggtatccaactccctgctaaatcggaagaggaaattttcgaacatctggggcttgaatacctggaaccgttcgaacgtaacgca

SEQ ID NO: 4448 - protein, 528 aa, synthetic construct
  REGION 1..528: note = Variant of terminal deoxynucleotidyltransferase
MHHHHHGGSGSHGIRTIDSDFGKKQQKKGDNHDSSATYEIKFHEFVLFILEEKMGATRRTFLTDLARKKGFRVENELTDEVTHIVAENLSRSEVLAWLKEHKMEKTKQFELLDISWLIESMKVGKPVDTKGKYQLAESVEVSANPDPTEGRVNELPPTMKTVSPYACQRRTTLNNRNQRFTDSLEILRENYELKGNDDTALEFRRAISVLKSLPFEVRSLKDTEGLPWISDEVKGIMEEIIEVGESREVQAVLNDEWYQSFHAFTRVFGVGVKTADKWYRMGLRTLEDVRSSKTLKLTPWQKVGLLYYEDLARGVTRAEADAIWLLVQDAVATFDPDAIVEIVGGFRRGKPQGHDVDLLISSPGAEKEQEDQLLQKVMNLWKKQGLLLCGRLEWSQWEWGGSPSGKADEGDAEASCFLILKLYDHLVRKSKRNMPTGSNMGESKPWKAIKVDLLRCPRGSFAFAMLQWTGNRMFRRDLRWYALEEKNMMLDNHSLYDMTRGIQLPAKSEEEIFEHLGLEYLEPFERNA

SEQ ID NO: 4449 - DNA, 1584 bp, synthetic construct
  misc_feature 1..1584: note = Variant of terminal deoxynucleotidyltransferase
  source 1..1584: mol_type = other DNA
atgcaccatcatcatcatggcggtagcggcagccacggcattcgtaccatcgattcggacttcgggaagaaacagcagaaaaaaggcgataaccacgatagttccgccacttatgaaatcaaatttcacgagtttgtgctgttcattctcgaagaaaaaatgggtgcgacgcgtcgtacttttctgacagatttagcccgcaagaaagggttccgcgtcgagaatgaactgaccgacgaagttacccacatcgtggcagaaaatctgtcacgctctgaagtattggcttggctgaaagaacacaagatggagaagaccaagcaattcgaactgctggatattagctggcttatcgaaagcatgaaagttggtaaaccggtggacaccaaggggaaataccagttggcggaatcggttgaggtgagtgcgaacccagatccgacagaaggtcgtgtaaacgagctgcctcctactatgaaaaccgtttctccgtatgcgtgtcaacgccgcaccaccctgaacaaccgtaatcaacgttttacggactcgctggagattcttcgtgaaaattacgagctgaaaggcaacgacgatactgcgctggaatttcgtcgtgctatctccgtgctgaaaagccttccgtttgaggtacgtagcctgaaagacacggaaggattgccctggatcagtgatgaagtcaaagggattatggaagaaatcatcgaagtcggggagtcgcgtgaagtgcaggccgtgctcaatgatgagtggtatcaaagcttccacgcatttacgcgtgtctttggagtgggggtgaagacagcagacaagtggtaccgtatgggtctgcgcaccctcgaggatgttcgttccagcaagaccctgaagttgaccccgtgggggaaagtaggtctgctgtattatgaagatcttgctcgcggcgttacgcgtgccgaagctgacgcgatttggctgctggttcaggatgcagtcgcaactttcgacccggatgcgatcgtggagattgtcggtggatttcgtcgtgggaaacctcagggtcacgacgttgatctgcttatcagttctccgggagctgaaaaagagcaagaagaccaactcctgcagaaagtgatgaatctgtggaagaaacaagggttgttgctgtgtggtcgtctggaatggagtcagtgggaatgggggggttcgccttccggtaaggctgatgagggtgacgcggaggcgtcgtgctttctgatcctcaaactttatgatcatctggtgcgtaaaagtaaacgcaatatgccgactggttcgaacatgggcgagtccaaaccgtggaaagcaattaaagtagatctgctgcgttgcccccgcggcagttttgcgtttgcgatgttgcagtggaccggaagccgcatgttccgtcgtgatctgcgctggtacgccctggaagagaagaacatgatgctggacaatcattcgctgtatgacatgactcgtggtatccaactccctgctaaatcggaagaggaaattttcgaacatctggggcttgaatacctggaaccgttcgaacgtaacgca

SEQ ID NO: 4450 - protein, 528 aa, synthetic construct
  REGION 1..528: note = Variant of terminal deoxynucleotidyltransferase
MHHHHHGGSGSHGIRTIDSDFGKKQQKKGDNHDSSATYEIKFHEFVLFILEEKMGATRRTFLTDLARKKGFRVENELTDEVTHIVAENLSRSEVLAWLKEHKMEKTKQFELLDISWLIESMKVGKPVDTKGKYQLAESVEVSANPDPTEGRVNELPPTMKTVSPYACQRRTTLNNRNQRFTDSLEILRENYELKGNDDTALEFRRAISVLKSLPFEVRSLKDTEGLPWISDEVKGIMEEIIEVGESREVQAVLNDEWYQSFHAFTRVFGVGVKTADKWYRMGLRTLEDVRSSKTLKLTPWGKVGLLYYEDLARGVTRAEADAIWLLVQDAVATFDPDAIVEIVGGFRRGKPQGHDVDLLISSPGAEKEQEDQLLQKVMNLWKKQGLLLCGRLEWSQWEWGGSPSGKADEGDAEASCFLILKLYDHLVRKSKRNMPTGSNMGESKPWKAIKVDLLRCPRGSFAFAMLQWTGSRMFRRDLRWYALEEKNMMLDNHSLYDMTRGIQLPAKSEEEIFEHLGLEYLEPFERNA

SEQ ID NO: 4451 - DNA, 1584 bp, synthetic construct
  misc_feature 1..1584: note = Variant of terminal deoxynucleotidyltransferase
  source 1..1584: mol_type = other DNA
atgcaccatcatcatcatggcggtagcggcagccacggcattcgtaccatcgattcggacttcgggaagaaacagcagaaaaaaggcgataaccacgatagttccgccacttatgaaatcaaatttcacgagtttgtgctgttcattctcgaagaaaaaatgggtgcgacgcgtcgtacttttctgacagatttagcccgcaagaaagggttccgcgtcgagaatgaactgaccgacgaagttacccacatcgtggcagaaaatctgtcacgctctgaagtattggcttggctgaaagaacacaagatggagaagaccaagcaattcgaactgctggatattagctggcttatcgaaagcatgaaagttggtaaaccggtggacaccaaggggaaataccagttggcggaatcggttgaggtgagtgcgaacccagatccgacagaaggtcgtgtaaacgagctgcctcctactatgaaaaccgtttctccgtatgcgtgtcaacgccgcaccaccctgaacaaccgtaatcaacgttttacggactcgctggagattcttcgtgaaaattacgagctgaaaggcaacgacgatactgcgctggaatttcgtcgtgctatctccgtgctgaaaagccttccgtttgaggtacgtagcctgaaagacacggaaggattgccctggatcagtgatgaagtcaaagggattatggaagaaatcatcgaagtcggggagtcgcgtgaagtgcaggccgtgctcaatgatgagtggtatcaaagcttccacgcatttacgcgtgtctttggagtgggggtgaagacagcagacaagtggtaccgtatgggtctgcgcaccctcgaggatgttcgttccagcaagaccctgaagttgaccccgtggcagaaagtaggtctgctgtatcaggaagatcttgctcgcggcgttacgcgtgccgaagctgacgcgatttggctgctggttcaggatgcagtcgcaactttcgacccggatgcgatcgtggagattgtcggtggatttcgtcgtgggaaacctcagggtcacgacgttgatctgcttatcagttctccgggagctgaaaaagagcaagaagaccaactcctgcagaaagtgatgaatctgtggaagaaacaagggttgttgctgtgtggtcgtctggaatggagtcagtgggaatgggggggttcgccttccggtaaggctgatgagggtgacgcggaggcgtcgtgctttctgatcctcaaactttatgatcatctggtgcgtaaaagtaaacgcaatatgccgactggttcgaacatgggcgagtccaaaccgtggaaagcaattaaagtagatctgctgcgttgcccccgcggcagttttgcgtttgcgatgttgcagtggaccggaagccgcatgttccgtcgtgatctgcgctggtacgccctggaagagaagaacatgatgctggacaatcattcgctgtatgacatgactcgtggtatccaactccctgctaaatcggaagaggaaattttcgaacatctggggcttgaatacctggaaccgttcgaacgtaacgca

SEQ ID NO: 4452 - protein, 528 aa, synthetic construct
  REGION 1..528: note = Variant of terminal deoxynucleotidyltransferase
MHHHHHGGSGSHGIRTIDSDFGKKQQKKGDNHDSSATYEIKFHEFVLFILEEKMGATRRTFLTDLARKKGFRVENELTDEVTHIVAENLSRSEVLAWLKEHKMEKTKQFELLDISWLIESMKVGKPVDTKGKYQLAESVEVSANPDPTEGRVNELPPTMKTVSPYACQRRTTLNNRNQRFTDSLEILRENYELKGNDDTALEFRRAISVLKSLPFEVRSLKDTEGLPWISDEVKGIMEEIIEVGESREVQAVLNDEWYQSFHAFTRVFGVGVKTADKWYRMGLRTLEDVRSSKTLKLTPWQKVGLLYQEDLARGVTRAEADAIWLLVQDAVATFDPDAIVEIVGGFRRGKPQGHDVDLLISSPGAEKEQEDQLLQKVMNLWKKQGLLLCGRLEWSQWEWGGSPSGKADEGDAEASCFLILKLYDHLVRKSKRNMPTGSNMGESKPWKAIKVDLLRCPRGSFAFAMLQWTGSRMFRRDLRWYALEEKNMMLDNHSLYDMTRGIQLPAKSEEEIFEHLGLEYLEPFERNA

SEQ ID NO: 4453 - DNA, 1584 bp, synthetic construct
  misc_feature 1..1584: note = Variant of terminal deoxynucleotidyltransferase
  source 1..1584: mol_type = other DNA
atgcaccatcatcatcatggcggtagcggcagccacggcattcgtaccatcgattcggacttcgggaagaaacagcagaaaaaaggcgataaccacgatagttccgccacttatgaaatcaaatttcacgagtttgtgctgttcattctcgaagaaaaaatgggtgcgacgcgtcgtacttttctgacagatttagcccgcaagaaagggttccgcgtcgagaatgaactgaccgacgaagttacccacatcgtggcagaaaatctgtcacgctctgaagtattggcttggctgaaagaacacaagatggagaagaccaagcaattcgaactgctggatattagctggcttatcgaaagcatgaaagttggtaaaccggtggacaccaaggggaaataccagttggcggaatcggttgaggtgagtgcgaacccagatccgacagaaggtcgtgtaaacgagctgcctcctactatgaaaaccgtttctccgtatgcgtgtcaacgccgcaccaccctgaacaaccgtaatcaacgttttacggactcgctggagattcttcgtgaaaattacgagctgaaaggcaacgacgatactgcgctggaatttcgtcgtgctatctccgtgctgaaaagccttccgtttgaggtacgtagcctgaaagacacggaaggattgccctggatcagtgatgaagtcaaagggattatggaagaaatcatcgaagtcggggagtcgcgtgaagtgcaggccgtgctcaatgatgagtggtatcaaagcttccacgcatttacgcgtgtctttggagtgggggtgaagacagcagacaagtggtaccgtatgggtctgcgcaccctcgaggatgttcgttccagcaagaccctgaagttgaccagttggcagaaagtaggtctgctgtattatgaagatcttgctcgcggcgttacgcgtgccgaagctgacgcgatttggctgctggttcaggatgcagtcgcaactttcgacccggatgcgatcgtggagattgtcggtggatttcgtcgtgggaaacctcagggtcacgacgttgatctgcttatcagttctccgggagctgaaaaagagcaagaagaccaactcctgcagaaagtgatgaatctgtggaagaaacaagggttgttgctgtgtggtcgtctggaatggagtcagtgggaatgggggggttcgccttccggtaaggctgatgagggtgacgcggaggcgtcgtgctttctgatcctcaaactttatgatcatctggtgcgtaaaagtaaacgcaatatgccgactggttcgaacatgggcgagtccaaaccgtggaaagcaattaaagtagatctgctgcgttgcccccgcggcagttttgcgtttgcgatgttgcagtggaccggaagccgcatgttccgtcgtgatctgcgctggtacgccctggaagagaagaacatgatgctggacaatcattcgctgtatgacatgactcgtggtatccaactccctgctaaatcggaagaggaaattttcgaacatctggggcttgaatacctggaaccgttcgaacgtaacgca

SEQ ID NO: 4454 - protein, 528 aa, synthetic construct
  REGION 1..528: note = Variant of terminal deoxynucleotidyltransferase
MHHHHHGGSGSHGIRTIDSDFGKKQQKKGDNHDSSATYEIKFHEFVLFILEEKMGATRRTFLTDLARKKGFRVENELTDEVTHIVAENLSRSEVLAWLKEHKMEKTKQFELLDISWLIESMKVGKPVDTKGKYQLAESVEVSANPDPTEGRVNELPPTMKTVSPYACQRRTTLNNRNQRFTDSLEILRENYELKGNDDTALEFRRAISVLKSLPFEVRSLKDTEGLPWISDEVKGIMEEIIEVGESREVQAVLNDEWYQSFHAFTRVFGVGVKTADKWYRMGLRTLEDVRSSKTLKLTSWQKVGLLYYEDLARGVTRAEADAIWLLVQDAVATFDPDAIVEIVGGFRRGKPQGHDVDLLISSPGAEKEQEDQLLQKVMNLWKKQGLLLCGRLEWSQWEWGGSPSGKADEGDAEASCFLILKLYDHLVRKSKRNMPTGSNMGESKPWKAIKVDLLRCPRGSFAFAMLQWTGSRMFRRDLRWYALEEKNMMLDNHSLYDMTRGIQLPAKSEEEIFEHLGLEYLEPFERNA

SEQ ID NO: 4455 - DNA, 1584 bp, synthetic construct
  misc_feature 1..1584: note = Variant of terminal deoxynucleotidyltransferase
  source 1..1584: mol_type = other DNA
atgcaccatcatcatcatggcggtagcggcagccacggcattcgtaccatcgattcggacttcgggaagaaacagcagaaaaaaggcgataaccacgatagttccgccacttatgaaatcaaatttcacgagtttgtgctgttcattctcgaagaaaaaatgggtgcgacgcgtcgtacttttctgacagatttagcccgcaagaaagggttccgcgtcgagaatgaactgaccgacgaagttacccacatcgtggcagaaaatctgtcacgctctgaagtattggcttggctgaaagaacacaagatggagaagaccaagcaattcgaactgctggatattagctggcttatcgaaagcatgaaagttggtaaaccggtggacaccaaggggaaataccagttggcggaatcggttgaggtgagtgcgaacccagatccgacagaaggtcgtgtaaacgagctgcctcctactatgaaaaccgtttctccgtatgcgtgtcaacgccgcaccaccctgaacaaccgtaatcaacgttttacggactcgctggagattcttcgtgaaaattacgagctgaaaggcaacgacgatactgcgctggaatttcgtcgtgctatctccgtgctgaaaagccttccgtttgaggtacgtagcctgaaagacacggaaggattgccctggatcagtgatgaagtcaaagggattatggaagaaatcatcgaagtcggggagtcgcgtgaagtgcaggccgtgctcaatgatgagtggtatcaaagcttccacgcatttacgcgtgtctttggagtgggggtgaagacagcagacaagtggtaccgtatgggtctgcgcaccctcgaggatgttcgttccagcaagaccctgaagttgaccgagtggcagaaagtaggtctgctgtattatgaagatcttgctcgcggcgttacgcgtgccgaagctgacgcgatttggctgctggttcaggatgcagtcgcaactttcgacccggatgcgatcgtggagattgtcggtggatttcgtcgtgggaaacctcagggtcacgacgttgatctgcttatcagttctccgggagctgaaaaagagcaagaagaccaactcctgcagaaagtgatgaatctgtggaagaaacaagggttgttgctgtgtggtcgtctggaatggagtcagtgggaatgggggggttcgccttccggtaaggctgatgagggtgacgcggaggcgtcgtgctttctgatcctcaaactttatgatcatctggtgcgtaaaagtaaacgcaatatgccgactggttcgaacatgggcgagtccaaaccgtggaaagcaattaaagtagatctgctgcgttgcccccgcggcagttttgcgtttgcgatgttgcagtggaccggaagccgcatgttccgtcgtgatctgcgctggtacgccctggaagagaagaacatgatgctggacaatcattcgctgtatgacatgactcgtggtatccaactccctgctaaatcggaagaggaaattttcgaacatctggggcttgaatacctggaaccgttcgaacgtaacgca

SEQ ID NO: 4456 - protein, 528 aa, synthetic construct
  REGION 1..528: note = Variant of terminal deoxynucleotidyltransferase
MHHHHHGGSGSHGIRTIDSDFGKKQQKKGDNHDSSATYEIKFHEFVLFILEEKMGATRRTFLTDLARKKGFRVENELTDEVTHIVAENLSRSEVLAWLKEHKMEKTKQFELLDISWLIESMKVGKPVDTKGKYQLAESVEVSANPDPTEGRVNELPPTMKTVSPYACQRRTTLNNRNQRFTDSLEILRENYELKGNDDTALEFRRAISVLKSLPFEVRSLKDTEGLPWISDEVKGIMEEIIEVGESREVQAVLNDEWYQSFHAFTRVFGVGVKTADKWYRMGLRTLEDVRSSKTLKLTEWQKVGLLYYEDLARGVTRAEADAIWLLVQDAVATFDPDAIVEIVGGFRRGKPQGHDVDLLISSPGAEKEQEDQLLQKVMNLWKKQGLLLCGRLEWSQWEWGGSPSGKADEGDAEASCFLILKLYDHLVRKSKRNMPTGSNMGESKPWKAIKVDLLRCPRGSFAFAMLQWTGSRMFRRDLRWYALEEKNMMLDNHSLYDMTRGIQLPAKSEEEIFEHLGLEYLEPFERNA

SEQ ID NO: 4457 - DNA, 1584 bp, synthetic construct
  misc_feature 1..1584: note = Variant of terminal deoxynucleotidyltransferase
  source 1..1584: mol_type = other DNA
atgcaccatcatcatcatggcggtagcggcagccacggcattcgtaccatcgattcggacttcgggaagaaacagcagaaaaaaggcgataaccacgatagttccgccacttatgaaatcaaatttcacgagtttgtgctgttcattctcgaagaaaaaatgggtgcgacgcgtcgtacttttctgacagatttagcccgcaagaaagggttccgcgtcgagaatgaactgaccgacgaagttacccacatcgtggcagaaaatctgtcacgctctgaagtattggcttggctgaaagaacacaagatggagaagaccaagcaattcgaactgctggatattagctggcttatcgaaagcatgaaagttggtaaaccggtggacaccaaggggaaataccagttggcggaatcggttgaggtgagtgcgaacccagatccgacagaaggtcgtgtaaacgagctgcctcctactatgaaaaccgtttctccgtatgcgtgtcaacgccgcaccaccctgaacaaccgtaatcaacgttttacggactcgctggagattcttcgtgaaaattacgagctgaaaggcaacgacgatactgcgctggaatttcgtcgtgctatctccgtgctgaaaagccttccgtttgaggtacgtagcctgaaagacacggaaggattgccctggatcagtgatgaagtcaaagggattatggaagaaatcatcgaagtcggggagtcgcgtgaagtgcaggccgtgctcaatgatgagtggtatcaaagcttccacgcatttacgcgtgtctttggagtgggggtgaagacagcagacaagtggtaccgtatgggtctgcgcaccctcgaggatgttcgttccagcaagaccctgaagttgaccccgtggcagaaagtaggtctgctgtattatgaagatcttgctcgcggcgttacgcgtgccgaagctgacgcgatttggctgctggttcaggatgcagtcgcaactttcgacccggatgcgatcgtggagattcttggtggatttcgtcgtgggaaacctcagggtcacgacgttgatctgcttatcagttctccgggagctgaaaaagagcaagaagaccaactcctgcagaaagtgatgaatctgtggaagaaacaagggttgttgctgtgtggtcgtctggaatggagtcagtgggaatgggggggttcgccttccggtaaggctgatgagggtgacgcggaggcgtcgtgctttctgatcctcaaactttatgatcatctggtgcgtaaaagtaaacgcaatatgccgactggttcgaacatgggcgagtccaaaccgtggaaagcaattaaagtagatctgctgcgttgcccccgcggcagttttgcgtttgcgatgttgcagtggaccggaagccgcatgttccgtcgtgatctgcgctggtacgccctggaagagaagaacatgatgctggacaatcattcgctgtatgacatgactcgtggtatccaactccctgctaaatcggaagaggaaattttcgaacatctggggcttgaatacctggaaccgttcgaacgtaacgca

SEQ ID NO: 4458 - protein, 528 aa, synthetic construct
  REGION 1..528: note = Variant of terminal deoxynucleotidyltransferase
MHHHHHGGSGSHGIRTIDSDFGKKQQKKGDNHDSSATYEIKFHEFVLFILEEKMGATRRTFLTDLARKKGFRVENELTDEVTHIVAENLSRSEVLAWLKEHKMEKTKQFELLDISWLIESMKVGKPVDTKGKYQLAESVEVSANPDPTEGRVNELPPTMKTVSPYACQRRTTLNNRNQRFTDSLEILRENYELKGNDDTALEFRRAISVLKSLPFEVRSLKDTEGLPWISDEVKGIMEEIIEVGESREVQAVLNDEWYQSFHAFTRVFGVGVKTADKWYRMGLRTLEDVRSSKTLKLTPWQKVGLLYYEDLARGVTRAEADAIWLLVQDAVATFDPDAIVEILGGFRRGKPQGHDVDLLISSPGAEKEQEDQLLQKVMNLWKKQGLLLCGRLEWSQWEWGGSPSGKADEGDAEASCFLILKLYDHLVRKSKRNMPTGSNMGESKPWKAIKVDLLRCPRGSFAFAMLQWTGSRMFRRDLRWYALEEKNMMLDNHSLYDMTRGIQLPAKSEEEIFEHLGLEYLEPFERNA

SEQ ID NO: 4459 - DNA, 1584 bp, synthetic construct
  misc_feature 1..1584: note = Variant of terminal deoxynucleotidyltransferase
  source 1..1584: mol_type = other DNA
atgcaccatcatcatcatggcggtagcggcagccacggcattcgtaccatcgattcggacttcgggaagaaacagcagaaaaaaggcgataaccacgatagttccgccacttatgaaatcaaatttcacgagtttgtgctgttcattctcgaagaaaaaatgggtgcgacgcgtcgtacttttctgacagatttagcccgcaagaaagggttccgcgtcgagaatgaactgaccgacgaagttacccacatcgtggcagaaaatctgtcacgctctgaagtattggcttggctgaaagaacacaagatggagaagaccaagcaattcgaactgctggatattagctggcttatcgaaagcatgaaagttggtaaaccggtggacaccaaggggaaataccagttggcggaatcggttgaggtgagtgcgaacccagatccgacagaaggtcgtgtaaacgagctgcctcctactatgaaaaccgtttctccgtatgcgtgtcaacgccgcaccaccctgaacaaccgtaatcaacgttttacggactcgctggagattcttcgtgaaaattacgagctgaaaggcaacgacgatactgcgctggaatttcgtcgtgctatctccgtgctgaaaagccttccgtttgaggtacgtagcctgaaagacacggaaggattgccctggatcagtgatgaagtcaaagggattatggaagaaatcatcgaagtcggggagtcgcgtgaagtgcaggccgtgctcaatgatgagtggtatcaaagcttccacgcatttacgcgtgtctttggagtgggggtgaagacagcagacaagtggtaccgtatgggtctgcgcaccctcgaggatgttcgttccagcaagaccctgaagttgaccccgtggtcgaaagtaggtctgctgtattatgaagatcttgctcgcggcgttacgcgtgccgaagctgacgcgatttggctgctggttcaggatgcagtcgcaactttcgacccggatgcgatcgtggagattgtcggtggatttcgtcgtgggaaacctcagggtcacgacgttgatctgcttatcagttctccgggagctgaaaaagagcaagaagaccaactcctgcagaaagtgatgaatctgtggaagaaacaagggttgttgctgtgtggtcgtctggaatggagtcagtgggaatgggggggttcgccttccggtaaggctgatgagggtgacgcggaggcgtcgtgctttctgatcctcaaactttatgatcatctggtgcgtaaaagtaaacgcaatatgccgactggttcgaacatgggcgagtccaaaccgtggaaagcaattaaagtagatctgctgcgttgcccccgcggcagttttgcgtttgcgatgttgcagtggaccggaagccgcatgttccgtcgtgatctgcgctggtacgccctggaagagaagaacatgatgctggacaatcattcgctgtatgacatgactcgtggtatcggactccctgctaaatcggaagaggaaattttcgaacatctggggcttgaatacctggaaccgttcgaacgtaacgca

SEQ ID NO: 4460 - protein, 528 aa, synthetic construct
  REGION 1..528: note = Variant of terminal deoxynucleotidyltransferase
MHHHHHGGSGSHGIRTIDSDFGKKQQKKGDNHDSSATYEIKFHEFVLFILEEKMGATRRTFLTDLARKKGFRVENELTDEVTHIVAENLSRSEVLAWLKEHKMEKTKQFELLDISWLIESMKVGKPVDTKGKYQLAESVEVSANPDPTEGRVNELPPTMKTVSPYACQRRTTLNNRNQRFTDSLEILRENYELKGNDDTALEFRRAISVLKSLPFEVRSLKDTEGLPWISDEVKGIMEEIIEVGESREVQAVLNDEWYQSFHAFTRVFGVGVKTADKWYRMGLRTLEDVRSSKTLKLTPWSKVGLLYYEDLARGVTRAEADAIWLLVQDAVATFDPDAIVEIVGGFRRGKPQGHDVDLLISSPGAEKEQEDQLLQKVMNLWKKQGLLLCGRLEWSQWEWGGSPSGKADEGDAEASCFLILKLYDHLVRKSKRNMPTGSNMGESKPWKAIKVDLLRCPRGSFAFAMLQWTGSRMFRRDLRWYALEEKNMMLDNHSLYDMTRGIGLPAKSEEEIFEHLGLEYLEPFERNA

SEQ ID NO: 4461 - DNA, 1584 bp, synthetic construct
  misc_feature 1..1584: note = Variant of terminal deoxynucleotidyltransferase
  source 1..1584: mol_type = other DNA
atgcaccatcatcatcatggcggtagcggcagccacggcattcgtaccatcgattcggacttcgggaagaaacagcagaaaaaaggcgataaccacgatagttccgccacttatgaaatcaaatttcacgagtttgtgctgttcattctcgaagaaaaaatgggtgcgacgcgtcgtacttttctgacagatttagcccgcaagaaagggttccgcgtcgagaatgaactgaccgacgaagttacccacatcgtggcagaaaatctgtcacgctctgaagtattggcttggctgaaagaacacaagatggagaagaccaagcaattcgaactgctggatattagctggcttatcgaaagcatgaaagttggtaaaccggtggacaccaaggggaaataccagttggcggaatcggttgaggtgagtgcgaacccagatccgacagaaggtcgtgtaaacgagctgcctcctactatgaaaaccgtttctccgtatgcgtgtcaacgccgcaccaccctgaacaaccgtaatcaacgttttacggactcgctggagattcttcgtgaaaattacgagctgaaaggcaacgacgatactgcgctggaatttcgtcgtgctatctccgtgctgaaaagccttccgtttgaggtacgtagcctgaaagacacggaaggattgccctggatcagtgatgaagtcaaagggattatggaagaaatcatcgaagtcggggagtcgcgtgaagtgcaggccgtgctcaatgatgagtggtatcaaagcttccacgcatttacgcgtgtctttggagtgggggtgaagacagcagacaagtggtaccgtatgggtctgcgcaccctcgaggatgttcgttccagcaagaccctgaagttgaccccgtggcagaaagtaggtctgctgtattatgaagatcttgctcgcggcgttacgcgtgccgaagctgacgcgatttggctgctggttcaggatgcagtcgcaactttcgacccggatgcgatcgtggagattgtcggtggatttcgtcgtgggaaacctcagggtcacgacgttgatctgcttatcagttctccgggagctgaaaaagagcaagaagaccaactcctgcagaaagtgatgaatctgtggaagaaacaagggttgttgctgtgtggtcgtctggaatggagtcagtgggaatgggggggttcgccttccggtaaggctgatgagggtgacgcggaggcgtcgtgctttgttatcctcaaactttatgatcatctggtgcgtaaaagtaaacgcaatatgccgactggttcgaacatgggcgagtccaaaccgtggaaagcaattaaagtagatctgctgcgttgcccccgcggcagttttgcgtttgcgatgttgcagtggaccggaagccgcatgttccgtcgtgatctgcgctggtacgccctggaagagaagaacatgatgctggacaatcattcgctgtatgacatgactcgtggtatcggactccctgctaaatcggaagaggaaattttcgaacatctggggcttgaatacctggaaccgttcgaacgtaacgca

SEQ ID NO: 4462 - protein, 528 aa, synthetic construct
  REGION 1..528: note = Variant of terminal deoxynucleotidyltransferase
MHHHHHGGSGSHGIRTIDSDFGKKQQKKGDNHDSSATYEIKFHEFVLFILEEKMGATRRTFLTDLARKKGFRVENELTDEVTHIVAENLSRSEVLAWLKEHKMEKTKQFELLDISWLIESMKVGKPVDTKGKYQLAESVEVSANPDPTEGRVNELPPTMKTVSPYACQRRTTLNNRNQRFTDSLEILRENYELKGNDDTALEFRRAISVLKSLPFEVRSLKDTEGLPWISDEVKGIMEEIIEVGESREVQAVLNDEWYQSFHAFTRVFGVGVKTADKWYRMGLRTLEDVRSSKTLKLTPWQKVGLLYYEDLARGVTRAEADAIWLLVQDAVATFDPDAIVEIVGGFRRGKPQGHDVDLLISSPGAEKEQEDQLLQKVMNLWKKQGLLLCGRLEWSQWEWGGSPSGKADEGDAEASCFVILKLYDHLVRKSKRNMPTGSNMGESKPWKAIKVDLLRCPRGSFAFAMLQWTGSRMFRRDLRWYALEEKNMMLDNHSLYDMTRGIGLPAKSEEEIFEHLGLEYLEPFERNA

SEQ ID NO: 4463 - DNA, 1584 bp, synthetic construct
  misc_feature 1..1584: note = Variant of terminal deoxynucleotidyltransferase
  source 1..1584: mol_type = other DNA
atgcaccatcatcatcatggcggtagcggcagccacggcattcgtaccatcgattcggacttcgggaagaaacagcagaaaaaaggcgataaccacgatagttccgccacttatgaaatcaaatttcacgagtttgtgctgttcattctcgaagaaaaaatgggtgcgacgcgtcgtacttttctgacagatttagcccgcaagaaagggttccgcgtcgagaatgaactgaccgacgaagttacccacatcgtggcagaaaatctgtcacgctctgaagtattggcttggctgaaagaacacaagatggagaagaccaagcaattcgaactgctggatattagctggcttatcgaaagcatgaaagttggtaaaccggtggacaccaaggggaaataccagttggcggaatcggttgaggtgagtgcgaacccagatccgacagaaggtcgtgtaaacgagctgcctcctactatgaaaaccgtttctccgtatgcgtgtcaacgccgcaccaccctgaacaaccgtaatcaacgttttacggactcgctggagattcttcgtgaaaattacactctgaaaggcaacgacgatactgcgctggaatttcgtcgtgctatctccgtgctgaaaagccttccgtttgaggtacgtagcctgaaagacacggaaggattgccctggatcagtgatgaagtcaaagggattatggaagaaatcatcgaagtcggggagtcgcgtgaagtgcaggccgtgctcaatgatgagtggtatcaaagcttccacgcatttacgcgtgtctttggagtgggggtgaagacagcagacaagtggtaccgtatgggtctgcgcaccctcgaggatgttcgttccagcaagaccctgaagttgaccccgtggcagaaagtaggtctgctgtattatgaagatcttgctcgcggcgttacgcgtgccgaagctgacgcgatttggctgctggttcaggatgcagtcgcaactttcgacccggatgcgatcgtggagattgtcggtggatttcgtcgtgggaaacctcagggtcacgacgttgatctgcttatcagttctccgggagctgaaaaagagcaagaagaccaactcctgcagaaagtgatgaatctgtggaagaaacaagggttgttgctgtgtggtcgtctggaatggagtcagtgggaatgggggggttcgccttccggtaaggctgatgagggtgacgcggaggcgtcgtgctttctgatcctcaaactttatgatcatctggtgcgtaaaagtaaacgcaatatgccgactggttcgaacatgggcgagtccaaaccgtggaaagcaattaaagtagatctgctgcgttgcccccgcggcagttttgcgtttgcgatgttgcagtggaccggaagccgcatgttccgtcgtgatctgcgctggtacgccctggaagagaagaacatgatgctggacaatcattcgctgtatgacatgactcgtggtatccaactccctgctaaatcggaagaggaaattttcgaacatctggggcttgaatacctggaaccgttcgaacgtaacgca

SEQ ID NO: 4464 - protein, 528 aa, synthetic construct
  REGION 1..528: note = Variant of terminal deoxynucleotidyltransferase
MHHHHHGGSGSHGIRTIDSDFGKKQQKKGDNHDSSATYEIKFHEFVLFILEEKMGATRRTFLTDLARKKGFRVENELTDEVTHIVAENLSRSEVLAWLKEHKMEKTKQFELLDISWLIESMKVGKPVDTKGKYQLAESVEVSANPDPTEGRVNELPPTMKTVSPYACQRRTTLNNRNQRFTDSLEILRENYTLKGNDDTALEFRRAISVLKSLPFEVRSLKDTEGLPWISDEVKGIMEEIIEVGESREVQAVLNDEWYQSFHAFTRVFGVGVKTADKWYRMGLRTLEDVRSSKTLKLTPWQKVGLLYYEDLARGVTRAEADAIWLLVQDAVATFDPDAIVEIVGGFRRGKPQGHDVDLLISSPGAEKEQEDQLLQKVMNLWKKQGLLLCGRLEWSQWEWGGSPSGKADEGDAEASCFLILKLYDHLVRKSKRNMPTGSNMGESKPWKAIKVDLLRCPRGSFAFAMLQWTGSRMFRRDLRWYALEEKNMMLDNHSLYDMTRGIQLPAKSEEEIFEHLGLEYLEPFERNA

SEQ ID NO: 4465 - DNA, 1584 bp, synthetic construct
  misc_feature 1..1584: note = Variant of terminal deoxynucleotidyltransferase
  source 1..1584: mol_type = other DNA
atgcaccatcatcatcatggcggtagcggcagccacggcattcgtaccatcgattcggacttcgggaagaaacagcagaaaaaaggcgataaccacgatagttccgccacttatgaaatcaaatttcacgagtttgtgctgttcattctcgaagaaaaaatgggtgcgacgcgtcgtacttttctgacagatttagcccgcaagaaagggttccgcgtcgagaatgaactgaccgacgaagttacccacatcgtggcagaaaatctgtcacgctctgaagtattggcttggctgaaagaacacaagatggagaagaccaagcaattcgaactgctggatattagctggcttatcgaaagcatgaaagttggtaaaccggtggacaccaaggggaaataccagttggcggaatcggttgaggtgagtgcgaacccagatccgacagaaggtcgtgtaaacgagctgcctcctactatgaaaaccgtttctccgtatgcgtgtcaacgccgcaccaccctgaacaaccgtaatcaacgttttacggactcgctggagattcttcgtgaaaattacgagctgaaaggcaacgacgatactgcgctggaatttcgtcgtgctatctccgtgctgaaaagccttccgtttgaggtacgtagcctgaaagacacggaaggattgccctggatcagtgatgaagtcaaagggattatggaagaaatcatcgaagtcggggagtcgcgtgaagtgcaggccgtgctcaatgatgagtggtatcaaagcttccacgcatttacgcgtgtctttggagtgggggtgaagacagcagacaagtggtaccgtatgggtctgcgcaccctcgaggatgttcgttccagcaagaccctgaagttgaccacttggcagaaagtaggtctgctgtattatgaagatcttgctcgcggcgttacgcgtgccgaagctgacgcgatttggctgctggttcaggatgcagtcgcaactttcgacccggatgcgatcgtggagattgtcggtggatttcgtcgtgggaaacctcagggtcacgacgttgatctgcttatcagttctccgggagctgaaaaagagcaagaagaccaactcctgcagaaagtgatgaatctgtggaagaaacaagggttgttgctgtgtggtcgtctggaatggagtcagtgggaatgggggggttcgccttccggtaaggctgatgagggtgacgcggaggcgtcgtgctttctgatcctcaaactttatgatcatctggtgcgtaaaagtaaacgcaatatgccgactggttcgaacatgggcgagtccaaaccgtggaaagcaattaaagtagatctgctgcgttgcccccgcggcagttttgcgtttgcgatgttgcagtggaccggaagccgcatgttccgtcgtgatctgcgctggtacgccctggaagagaagaacatgatgctggacaatcattcgctgtatgacatgactcgtggtatccaactccctgctaaatcggaagaggaaattttcgaacatctggggcttgaatacctggaaccgttcgaacgtaacgca

SEQ ID NO: 4466 - protein, 528 aa, synthetic construct
  REGION 1..528: note = Variant of terminal deoxynucleotidyltransferase
MHHHHHGGSGSHGIRTIDSDFGKKQQKKGDNHDSSATYEIKFHEFVLFILEEKMGATRRTFLTDLARKKGFRVENELTDEVTHIVAENLSRSEVLAWLKEHKMEKTKQFELLDISWLIESMKVGKPVDTKGKYQLAESVEVSANPDPTEGRVNELPPTMKTVSPYACQRRTTLNNRNQRFTDSLEILRENYELKGNDDTALEFRRAISVLKSLPFEVRSLKDTEGLPWISDEVKGIMEEIIEVGESREVQAVLNDEWYQSFHAFTRVFGVGVKTADKWYRMGLRTLEDVRSSKTLKLTTWQKVGLLYYEDLARGVTRAEADAIWLLVQDAVATFDPDAIVEIVGGFRRGKPQGHDVDLLISSPGAEKEQEDQLLQKVMNLWKKQGLLLCGRLEWSQWEWGGSPSGKADEGDAEASCFLILKLYDHLVRKSKRNMPTGSNMGESKPWKAIKVDLLRCPRGSFAFAMLQWTGSRMFRRDLRWYALEEKNMMLDNHSLYDMTRGIQLPAKSEEEIFEHLGLEYLEPFERNA

SEQ ID NO: 4467 - DNA, 1584 bp, synthetic construct
  misc_feature 1..1584: note = Variant of terminal deoxynucleotidyltransferase
  source 1..1584: mol_type = other DNA
atgcaccatcatcatcatggcggtagcggcagccacggcattcgtaccatcgattcggacttcgggaagaaacagcagaaaaaaggcgataaccacgatagttccgccacttatgaaatcaaatttcacgagtttgtgctgttcattctcgaagaaaaaatgggtgcgacgcgtcgtacttttctgacagatttagcccgcaagaaagggttccgcgtcgagaatgaactgaccgacgaagttacccacatcgtggcagaaaatctgtcacgctctgaagtattggcttggctgaaagaacacaagatggagaagaccaagcaattcgaactgctggatattagctggcttatcgaaagcatgaaagttggtaaaccggtggacaccaaggggaaataccagttggcggaatcggttgaggtgagtgcgaacccagatccgacagaaggtcgtgtaaacgagctgcctcctactatgaaaaccgtttctccgtatgcgtgtcaacgccgcaccaccctgaacaaccgtaatcaacgttttacggactcgctggagattcttcgtgaaaattacgagctgaaaggcaacgacgatactgcgctggaatttcgtcgtgctatctccgtgctgaaaagccttccgtttgaggtacgtagcctgaaagacacggaaggattgccctggatcagtgatgaagtcaaagggattatggaagaaatcatcgaagtcggggagtcgcgtgaagtgcaggccgtgctcaatgatgagtggtatcaaagcttccacgcatttacgcgtgtctttggagtgggggtgaagacagcagacaagtggtaccgtatgggtctgcgcaccctcgaggatgttcgttccagcaagaccctgaagttgaccaagtggcagaaagtaggtctgctgtattatgaagatcttgctcgcggcgttacgcgtgccgaagctgacgcgatttggctgctggttcaggatgcagtcgcaactttcgacccggatgcgatcgtggagattgtcggtggatttcgtcgtgggaaacctcagggtcacgacgttgatctgcttatcagttctccgggagctgaaaaagagcaagaagaccaactcctgcagaaagtgatgaatctgtggaagaaacaagggttgttgctgtgtggtcgtctggaatggagtcagtgggaatgggggggttcgccttccggtaaggctgatgagggtgacgcggaggcgtcgtgctttctgatcctcaaactttatgatcatctggtgcgtaaaagtaaacgcaatatgccgactggttcgaacatgggcgagtccaaaccgtggaaagcaattaaagtagatctgctgcgttgcccccgcggcagttttgcgtttgcgatgttgcagtggaccggaagccgcatgttccgtcgtgatctgcgctggtacgccctggaagagaagaacatgatgctggacaatcattcgctgtatgaccctagtcgtggtatcggtctccctgctaaatcggaagaggaaattttcgaacatctggggcttgaatacctggaaccgttcgaacgtaacgca

SEQ ID NO: 4468 - protein, 528 aa, synthetic construct
  REGION 1..528: note = Variant of terminal deoxynucleotidyltransferase
MHHHHHGGSGSHGIRTIDSDFGKKQQKKGDNHDSSATYEIKFHEFVLFILEEKMGATRRTFLTDLARKKGFRVENELTDEVTHIVAENLSRSEVLAWLKEHKMEKTKQFELLDISWLIESMKVGKPVDTKGKYQLAESVEVSANPDPTEGRVNELPPTMKTVSPYACQRRTTLNNRNQRFTDSLEILRENYELKGNDDTALEFRRAISVLKSLPFEVRSLKDTEGLPWISDEVKGIMEEIIEVGESREVQAVLNDEWYQSFHAFTRVFGVGVKTADKWYRMGLRTLEDVRSSKTLKLTKWQKVGLLYYEDLARGVTRAEADAIWLLVQDAVATFDPDAIVEIVGGFRRGKPQGHDVDLLISSPGAEKEQEDQLLQKVMNLWKKQGLLLCGRLEWSQWEWGGSPSGKADEGDAEASCFLILKLYDHLVRKSKRNMPTGSNMGESKPWKAIKVDLLRCPRGSFAFAMLQWTGSRMFRRDLRWYALEEKNMMLDNHSLYDPSRGIGLPAKSEEEIFEHLGLEYLEPFERNA

SEQ ID NO: 4469 - DNA, 1584 bp, synthetic construct
  misc_feature 1..1584: note = Variant of terminal deoxynucleotidyltransferase
  source 1..1584: mol_type = other DNA
atgcaccatcatcatcatggcggtagcggcagccacggcattcgtaccatcgattcggacttcgggaagaaacagcagaaaaaaggcgataaccacgatagttccgccacttatgaaatcaaatttcacgagtttgtgctgttcattctcgaagaaaaaatgggtgcgacgcgtcgtacttttctgacagatttagcccgcaagaaagggttccgcgtcgagaatgaactgaccgacgaagttacccacatcgtggcagaaaatctgtcacgctctgaagtattggcttggctgaaagaacacaagatggagaagaccaagcaattcgaactgctggatattagctggcttatcgaaagcatgaaagttggtaaaccggtggacaccaaggggaaataccagttggcggaatcggttgaggtgagtgcgaacccagatccgacagaaggtcgtgtaaacgagctgcctcctactatgaaaaccgtttctccgtatgcgtgtcaacgccgcaccaccctgaacaaccgtaatcaacgttttacggactcgctggagattcttcgtgaaaattacggtctgaaaggcaacgacgatactgcgctggaatttcgtcgtgctatctccgtgctgaaaagccttccgtttgaggtacgtagcctgaaagacacggaaggattgccctggatcagtgatgaagtcaaagggattatggaagaaatcatcgaagtcggggagtcgcgtgaagtgcaggccgtgctcaatgatgagtggtatcaaagcttccacgcatttacgcgtgtctttggagtgggggtgaagacagcagacaagtggtaccgtatgggtctgcgcaccctcgaggatgttcgttccagcaagaccctgaagttgaccccgtggcagaaagtaggtctgctgtattatgaagatcttgctcgcggcgttacgcgtgccgaagctgacgcgatttggctgctggttcaggatgcagtcgcaactttcgacccggatgcgatcgtggagattgtcggtggatttcgtcgtgggaaacctcagggtcacgacgttgatctgcttatcagttctccgggagctgaaaaagagcaagaagaccaactcctgcagaaagtgatgaatctgtggaagaaacaagggttgttgctgtgtggtcgtctggaatggagtcagtgggaatgggggggttcgccttccggtaaggctgatgagggtgacgcggaggcgtcgtgctttctgatcctcaaactttatgatcatctggtgcgtaaaagtaaacgcaatatgccgactggttcgaacatgggcgagtccaaaccgtggaaagcaattaaagtagatctgctgcgttgcccccgcggcagttttgcgtttgcgatgttgcagtggaccggaagccgcatgttccgtcgtgatctgcgctggtacgccctggaagagaagaacatgatgctggacaatcattcgctgtatgacatgactcgtggtatccaactccctgctaaatcggaagaggaaattttcgaacatctggggcttgaatacctggaaccgttcgaacgtaacgca

SEQ ID NO: 4470 - protein, 528 aa, synthetic construct
  REGION 1..528: note = Variant of terminal deoxynucleotidyltransferase
MHHHHHGGSGSHGIRTIDSDFGKKQQKKGDNHDSSATYEIKFHEFVLFILEEKMGATRRTFLTDLARKKGFRVENELTDEVTHIVAENLSRSEVLAWLKEHKMEKTKQFELLDISWLIESMKVGKPVDTKGKYQLAESVEVSANPDPTEGRVNELPPTMKTVSPYACQRRTTLNNRNQRFTDSLEILRENYGLKGNDDTALEFRRAISVLKSLPFEVRSLKDTEGLPWISDEVKGIMEEIIEVGESREVQAVLNDEWYQSFHAFTRVFGVGVKTADKWYRMGLRTLEDVRSSKTLKLTPWQKVGLLYYEDLARGVTRAEADAIWLLVQDAVATFDPDAIVEIVGGFRRGKPQGHDVDLLISSPGAEKEQEDQLLQKVMNLWKKQGLLLCGRLEWSQWEWGGSPSGKADEGDAEASCFLILKLYDHLVRKSKRNMPTGSNMGESKPWKAIKVDLLRCPRGSFAFAMLQWTGSRMFRRDLRWYALEEKNMMLDNHSLYDMTRGIQLPAKSEEEIFEHLGLEYLEPFERNA

SEQ ID NO: 4471 - DNA, 1584 bp, synthetic construct
  misc_feature 1..1584: note = Variant of terminal deoxynucleotidyltransferase
  source 1..1584: mol_type = other DNA
atgcaccatcatcatcatggcggtagcggcagccacggcattcgtaccatcgattcggacttcgggaagaaacagcagaaaaaaggcgataaccacgatagttccgccacttatgaaatcaaatttcacgagtttgtgctgttcattctcgaagaaaaaatgggtgcgacgcgtcgtacttttctgacagatttagcccgcaagaaagggttccgcgtcgagaatgaactgaccgacgaagttacccacatcgtggcagaaaatctgtcacgctctgaagtattggcttggctgaaagaacacaagatggagaagaccaagcaattcgaactgctggatattagctggcttatcgaaagcatgaaagttggtaaaccggtggacaccaaggggaaataccagttggcggaatcggttgaggtgagtgcgaacccagatccgacagaaggtcgtgtaaacgagctgcctcctactatgaaaaccgtttctccgtatgcgtgtcaacgccgcaccaccctgaacaaccgtaatcaacgttttacggactcgctggagattcttcgtgaaaattacgagctgaaaggcaacgacgatactgcgctggaatttcgtcgtgctatctccgtgctgaaaagccttccgtttgaggtacgtagcctgaaagacacggaaggattgccctggatcagtgatgaagtcaaagggattatggaagaaatcatcgaagtcggggagtcgcgtgaagtgcaggccgtgctcaatgatgagtggtatcaaagcttccacgcatttacgcgtgtctttggagtgggggtgaagacagcagacaagtggtaccgtatgggtctgcgcaccctcgaggatgttcgttccagcaagaccctgggtttgaccccgtggcagaaagtaggtctgctgtattatgaagatcttgctcgcggcgttacgcgtgccgaagctgacgcgatttggctgctggttcaggatgcagtcgcaactttcgacccggatgcgatcgtggagattgtcggtggatttcgtcgtgggaaacctcagggtcacgacgttgatctgcttatcagttctccgggagctgaaaaagagcaagaagaccaactcctgcagaaagtgatgaatctgtggaagaaacaagggttgttgctgtgtggtcgtctggaatggagtcagtgggaatgggggggttcgccttccggtaaggctgatgagggtgacgcggaggcgtcgtgctttctgatcctcaaactttatgatcatctggtgcgtaaaagtaaacgcaatatgccgactggttcgaacatgggcgagtccaaaccgtggaaagcaattaaagtagatctgctgcgttgcccccgcggcagttttgcgtttgcgatgttgcagtggaccggaagccgcatgttccgtcgtgatctgcgctggtacgccctggaagagaagaacatgatgctggacaatcattcgctgtatgacatgactcgtggtatccaactccctgctaaatcggaagaggaaattttcgaacatctggggcttgaatacctggaaccgttcgaacgtaacgca

SEQ ID NO: 4472 - protein, 528 aa, synthetic construct
  REGION 1..528: note = Variant of terminal deoxynucleotidyltransferase
MHHHHHGGSGSHGIRTIDSDFGKKQQKKGDNHDSSATYEIKFHEFVLFILEEKMGATRRTFLTDLARKKGFRVENELTDEVTHIVAENLSRSEVLAWLKEHKMEKTKQFELLDISWLIESMKVGKPVDTKGKYQLAESVEVSANPDPTEGRVNELPPTMKTVSPYACQRRTTLNNRNQRFTDSLEILRENYELKGNDDTALEFRRAISVLKSLPFEVRSLKDTEGLPWISDEVKGIMEEIIEVGESREVQAVLNDEWYQSFHAFTRVFGVGVKTADKWYRMGLRTLEDVRSSKTLGLTPWQKVGLLYYEDLARGVTRAEADAIWLLVQDAVATFDPDAIVEIVGGFRRGKPQGHDVDLLISSPGAEKEQEDQLLQKVMNLWKKQGLLLCGRLEWSQWEWGGSPSGKADEGDAEASCFLILKLYDHLVRKSKRNMPTGSNMGESKPWKAIKVDLLRCPRGSFAFAMLQWTGSRMFRRDLRWYALEEKNMMLDNHSLYDMTRGIQLPAKSEEEIFEHLGLEYLEPFERNA

SEQ ID NO: 4473 - DNA, 1584 bp, synthetic construct
  misc_feature 1..1584: note = Variant of terminal deoxynucleotidyltransferase
  source 1..1584: mol_type = other DNA
atgcaccatcatcatcatggcggtagcggcagccacggcattcgtaccatcgattcggacttcgggaagaaacagcagaaaaaaggcgataaccacgatagttccgccacttatgaaatcaaatttcacgagtttgtgctgttcattctcgaagaaaaaatgggtgcgacgcgtcgtacttttctgacagatttagcccgcaagaaagggttccgcgtcgagaatgaactgaccgacgaagttacccacatcgtggcagaaaatctgtcacgctctgaagtattggcttggctgaaagaacacaagatggagaagaccaagcaattcgaactgctggatattagctggcttatcgaaagcatgaaagttggtaaaccggtggacaccaaggggaaataccagttggcggaatcggttgaggtgagtgcgaacccagatccgacagaaggtcgtgtaaacgagctgcctcctactatgaaaaccgtttctccgtatgcgtgtcaacgccgcaccaccctgaacaaccgtaatcaacgttttacggactcgctggagattcttcgtgaaaattacgttctgaaaggcaacgacgatactgcgctggaatttcgtcgtgctatctccgtgctgaaaagccttccgtttgaggtacgtagcctgaaagacacggaaggattgccctggatcagtgatgaagtcaaagggattatggaagaaatcatcgaagtcggggagtcgcgtgaagtgcaggccgtgctcaatgatgagtggtatcaaagcttccacgcatttacgcgtgtctttggagtgggggtgaagacagcagacaagtggtaccgtatgggtctgcgcaccctcgaggatgttcgttccagcaagaccctgaagttgaccccgtggcagaaagtaggtctgctgtattatgaagatcttgctcgcggcgttacgcgtgccgaagctgacgcgatttggctgctggttcaggatgcagtcgcaactttcgacccggatgcgatcgtggagattgtcggtggatttcgtcgtgggaaacctcagggtcacgacgttgatctgcttatcagttctccgggagctgaaaaagagcaagaagaccaactcctgcagaaagtgatgaatctgtggaagaaacaagggttgttgctgtgtggtcgtctggaatggagtcagtgggaatgggggggttcgccttccggtaaggctgatgagggtgacgcggaggcgtcgtgctttctgatcctcaaactttatgatcatctggtgcgtaaaagtaaacgcaatatgccgactggttcgaacatgggcgagtccaaaccgtggaaagcaattaaagtagatctgctgcgttgcccccgcggcagttttgcgtttgcgatgttgcagtggaccggaagccgcatgttccgtcgtgatctgcgctggtacgccctggaagagaagaacatgatgctggacaatcattcgctgtatgacatgactcgtggtatccaactccctgctaaatcggaagaggaaattttcgaacatctggggcttgaatacctggaaccgttcgaacgtaacgca

SEQ ID NO: 4474 - protein, 528 aa, synthetic construct
  REGION 1..528: note = Variant of terminal deoxynucleotidyltransferase
MHHHHHGGSGSHGIRTIDSDFGKKQQKKGDNHDSSATYEIKFHEFVLFILEEKMGATRRTFLTDLARKKGFRVENELTDEVTHIVAENLSRSEVLAWLKEHKMEKTKQFELLDISWLIESMKVGKPVDTKGKYQLAESVEVSANPDPTEGRVNELPPTMKTVSPYACQRRTTLNNRNQRFTDSLEILRENYVLKGNDDTALEFRRAISVLKSLPFEVRSLKDTEGLPWISDEVKGIMEEIIEVGESREVQAVLNDEWYQSFHAFTRVFGVGVKTADKWYRMGLRTLEDVRSSKTLKLTPWQKVGLLYYEDLARGVTRAEADAIWLLVQDAVATFDPDAIVEIVGGFRRGKPQGHDVDLLISSPGAEKEQEDQLLQKVMNLWKKQGLLLCGRLEWSQWEWGGSPSGKADEGDAEASCFLILKLYDHLVRKSKRNMPTGSNMGESKPWKAIKVDLLRCPRGSFAFAMLQWTGSRMFRRDLRWYALEEKNMMLDNHSLYDMTRGIQLPAKSEEEIFEHLGLEYLEPFERNA

SEQ ID NO: 4475 - DNA, 1584 bp, synthetic construct
  misc_feature 1..1584: note = Variant of terminal deoxynucleotidyltransferase
  source 1..1584: mol_type = other DNA
atgcaccatcatcatcatggcggtagcggcagccacggcattcgtaccatcgattcggacttcgggaagaaacagcagaaaaaaggcgataaccacgatagttccgccacttatgaaatcaaatttcacgagtttgtgctgttcattctcgaagaaaaaatgggtgcgacgcgtcgtacttttctgacagatttagcccgcaagaaagggttccgcgtcgagaatgaactgaccgacgaagttacccacatcgtggcagaaaatctgtcacgctctgaagtattggcttggctgaaagaacacaagatggagaagaccaagcaattcgaactgctggatattagctggcttatcgaaagcatgaaagttggtaaaccggtggacaccaaggggaaataccagttggcggaatcggttgaggtgagtgcgaacccagatccgacagaaggtcgtgtaaacgagctgcctcctactatgaaaaccgtttctccgtatgcgtgtcaacgccgcaccaccctgaacaaccgtaatcaacgttttacggactcgctggagattcttcgtgaaaattacgagctgaaaggcaacgacgatactgcgctggaatttcgtcgtgctatctccgtgctgaaaagccttccgtttgaggtacgtagcctgaaagacacggaaggattgccctggatcagtgatgaagtcaaagggattatggaagaaatcatcgaagtcggggagtcgcgtgaagtgcaggccgtgctcaatgatgagtggtatcaaagcttccacgcatttacgcgtgtctttggagtgggggtgaagacagcagacaagtggtaccatatgggtctgcgcaccctcgaggatgttcgttccagcaagaccctgaagttgaccccgtggcagaaagtaggtctgctgtattatgaagatcttgctcgcggcgttacgcgtgccgaagctgacgcgatttggctgctggttcaggatgcagtcgcaactttcgacccggatgcgatcgtggagattgtcggtggatttcgtcgtgggaaacctcagggtcacgacgttgatctgcttatcagttctccgggagctgaaaaagagcaagaagaccaactcctgcagaaagtgatgaatctgtggaagaaacaagggttgttgctgtgtggtcgtctggaatggagtcagtgggaatgggggggttcgccttccggtaaggctgatgagggtgacgcggaggcgtcgtgctttctgatcctcaaactttatgatcatctggtgcgtaaaagtaaacgcaatatgccgactggttcgaacatgggcgagtccaaaccgtggaaagcaattaaagtagatctgctgcgttgcccccgcggcagttttgcgtttgcgatgttgcagtggaccggaagccgcatgttccgtcgtgatctgcgctggtacgccctggaagagaagaacatgatgctggacaatcattcgctgtatgacatgactcgtggtatccaactccctgctaaatcggaagaggaaattttcgaacatctggggcttgaatacctggaaccgttcgaacgtaacgca

SEQ ID NO: 4476 - protein, 528 aa, synthetic construct
  REGION 1..528: note = Variant of terminal deoxynucleotidyltransferase
MHHHHHGGSGSHGIRTIDSDFGKKQQKKGDNHDSSATYEIKFHEFVLFILEEKMGATRRTFLTDLARKKGFRVENELTDEVTHIVAENLSRSEVLAWLKEHKMEKTKQFELLDISWLIESMKVGKPVDTKGKYQLAESVEVSANPDPTEGRVNELPPTMKTVSPYACQRRTTLNNRNQRFTDSLEILRENYELKGNDDTALEFRRAISVLKSLPFEVRSLKDTEGLPWISDEVKGIMEEIIEVGESREVQAVLNDEWYQSFHAFTRVFGVGVKTADKWYHMGLRTLEDVRSSKTLKLTPWQKVGLLYYEDLARGVTRAEADAIWLLVQDAVATFDPDAIVEIVGGFRRGKPQGHDVDLLISSPGAEKEQEDQLLQKVMNLWKKQGLLLCGRLEWSQWEWGGSPSGKADEGDAEASCFLILKLYDHLVRKSKRNMPTGSNMGESKPWKAIKVDLLRCPRGSFAFAMLQWTGSRMFRRDLRWYALEEKNMMLDNHSLYDMTRGIQLPAKSEEEIFEHLGLEYLEPFERNA

SEQ ID NO: 4477 - DNA, 1584 bp, synthetic construct
  misc_feature 1..1584: note = Variant of terminal deoxynucleotidyltransferase
  source 1..1584: mol_type = other DNA
atgcaccatcatcatcatggcggtagcggcagccacggcattcgtaccatcgattcggacttcgggaagaaacagcagaaaaaaggcgataaccacgatagttccgccacttatgaaatcaaatttcacgagtttgtgctgttcattctcgaagaaaaaatgggtgcgacgcgtcgtacttttctgacagatttagcccgcaagaaagggttccgcgtcgagaatgaactgaccgacgaagttacccacatcgtggcagaaaatctgtcacgctctgaagtattggcttggctgaaagaacacaagatggagaagaccaagcaattcgaactgctggatattagctggcttatcgaaagcatgaaagttggtaaaccggtggacaccaaggggaaataccagttggcggaatcggttgaggtgagtgcgaacccagatccgacagaaggtcgtgtaaacgagctgcctcctactatgaaaaccgtttctccgtatgcgtgtcaacgccgcaccaccctgaacaaccgtaatcaacgttttacggactcgctggagattcttcgtgaaaattacgagctgaaaggcaacgacgatactgcgctggaatttcgtcgtgctatctccgtgctgaaaagccttccgtttgaggtacgtagcctgaaagacacggaaggattgccctggatcagtgatgaagtcaaagggattatggaagaaatcatcgaagtcggggagtcgcgtgaagtgcaggccgtgctcaatgatgagtggtatcaaagcttccacgcatttacgcgtgtctttggagtgggggtgaagacagcagacaagtggtaccgtatgggtctgcgcaccctcgaggatgttcgttccagcaagaccctgaagttgaccccgtggcagaaagtaggtctgctgtattatgaagatcttgctcgcggcgttacgcgtgccgaagctgacgcgatttggctgctggttcaggatgcagtcgcaactttcgacccggatgcgatcgtggagattgtcggtggatttcgtcgtgggaaacctcagggtcacgacgttgatctgcttatcagttctccgggagctgaaaaagagcaagaagaccaactcctgcagaaagtgatgaatctgtggaagaaacaagggttgttgctgtgtggtcgtctggaatggagtcagtgggaatgggggggttcgccttccggtaaggctgatgagggtgacgcggaggcgtcgtgctttctgatcctcaaactttatgatcatctggtgcgtaaaagtaaacgcaatatgccgactggttcgaacatgggcgagtccaaaccgtggaaagcaattaaagtagatctgctgcgttgcccccgcggcagttttgcgtttgcgatgttgcagtggaccggaagccgccagttccgtcgtgatctgcgctggtacgccctggaagagaagaacatgatgctggacaatcattcgctgtatgacatgactcgtggtatccaactccctgctaaatcggaagaggaaattttcgaacatctggggcttgaatacctggaaccgttcgaacgtaacgca

SEQ ID NO: 4478 - protein, 528 aa, synthetic construct
  REGION 1..528: note = Variant of terminal deoxynucleotidyltransferase
MHHHHHGGSGSHGIRTIDSDFGKKQQKKGDNHDSSATYEIKFHEFVLFILEEKMGATRRTFLTDLARKKGFRVENELTDEVTHIVAENLSRSEVLAWLKEHKMEKTKQFELLDISWLIESMKVGKPVDTKGKYQLAESVEVSANPDPTEGRVNELPPTMKTVSPYACQRRTTLNNRNQRFTDSLEILRENYELKGNDDTALEFRRAISVLKSLPFEVRSLKDTEGLPWISDEVKGIMEEIIEVGESREVQAVLNDEWYQSFHAFTRVFGVGVKTADKWYRMGLRTLEDVRSSKTLKLTPWQKVGLLYYEDLARGVTRAEADAIWLLVQDAVATFDPDAIVEIVGGFRRGKPQGHDVDLLISSPGAEKEQEDQLLQKVMNLWKKQGLLLCGRLEWSQWEWGGSPSGKADEGDAEASCFLILKLYDHLVRKSKRNMPTGSNMGESKPWKAIKVDLLRCPRGSFAFAMLQWTGSRQFRRDLRWYALEEKNMMLDNHSLYDMTRGIQLPAKSEEEIFEHLGLEYLEPFERNA

SEQ ID NO: 4479 - DNA, 1584 bp, synthetic construct
  misc_feature 1..1584: note = Variant of terminal deoxynucleotidyltransferase
  source 1..1584: mol_type = other DNA
atgcaccatcatcatcatggcggtagcggcagccacggcattcgtaccatcgattcggacttcgggaagaaacagcagaaaaaaggcgataaccacgatagttccgccacttatgaaatcaaatttcacgagtttgtgctgttcattctcgaagaaaaaatgggtgcgacgcgtcgtacttttctgacagatttagcccgcaagaaagggttccgcgtcgagaatgaactgaccgacgaagttacccacatcgtggcagaaaatctgtcacgctctgaagtattggcttggctgaaagaacacaagatggagaagaccaagcaattcgaactgctggatattagctggcttatcgaaagcatgaaagttggtaaaccggtggacaccaaggggaaataccagttggcggaatcggttgaggtgagtgcgaacccagatccgacagaaggtcgtgtaaacgagctgcctcctactatgaaaaccgtttctccgtatgcgtgtcaacgccgcaccaccctgaacaaccgtaatcaacgttttacggactcgctggagattcttcgtgaaaattacgagctgaaaggcaacgacgatactgcgctggaatttcgtcgtgctatctccgtgctgaaaagccttccgtttgaggtacgtagcctgaaagacacggaaggattgccctggatcagtgatgaagtcaaagggattatggaagaaatcatcgaagtcggggagtcgcgtgaagtgcaggccgtgctcaatgatgagtggtatcaaagcttccacgcatttacgcgtgtctttggagtgggggtgaagacagcagacaagtggtaccgtatgggtctgcgcaccctcgaggatgttcgttccagcaagaccctgaagtttaccccgtggcagaaagtaggtctgctgtattatgaagatcttgctcgcggcgttacgcgtgccgaagctgacgcgatttggctgctggttcaggatgcagtcgcaactttcgacccggatgcgatcgtggagattgtcggtggatttcgtcgtgggaaacctcagggtcacgacgttgatctgcttatcagttctccgggagctgaaaaagagcaagaagaccaactcctgcagaaagtgatgaatctgtggaagaaacaagggttgttgctgtgtggtcgtctggaatggagtcagtgggaatgggggggttcgccttccggtaaggctgatgagggtgacgcggaggcgtcgtgctttctgatcctcaaactttatgatcatctggtgcgtaaaagtaaacgcaatatgccgactggttcgaacatgggcgagtccaaaccgtggaaagcaattaaagtagatctgctgcgttgcccccgcggcagttttgcgtttgcgatgttgcagtggaccggaagccgcatgttccgtcgtgatctgcgctggtacgccctggaagagaagaacatgatgctggacaatcattcgctgtatgacatgactcgtggtatccaactccctgctaaatcggaagaggaaattttcgaacatctggggcttgaatacctggaaccgttcgaacgtaacgca

SEQ ID NO: 4480 - protein, 528 aa, synthetic construct
  REGION 1..528: note = Variant of terminal deoxynucleotidyltransferase
MHHHHHGGSGSHGIRTIDSDFGKKQQKKGDNHDSSATYEIKFHEFVLFILEEKMGATRRTFLTDLARKKGFRVENELTDEVTHIVAENLSRSEVLAWLKEHKMEKTKQFELLDISWLIESMKVGKPVDTKGKYQLAESVEVSANPDPTEGRVNELPPTMKTVSPYACQRRTTLNNRNQRFTDSLEILRENYELKGNDDTALEFRRAISVLKSLPFEVRSLKDTEGLPWISDEVKGIMEEIIEVGESREVQAVLNDEWYQSFHAFTRVFGVGVKTADKWYRMGLRTLEDVRSSKTLKFTPWQKVGLLYYEDLARGVTRAEADAIWLLVQDAVATFDPDAIVEIVGGFRRGKPQGHDVDLLISSPGAEKEQEDQLLQKVMNLWKKQGLLLCGRLEWSQWEWGGSPSGKADEGDAEASCFLILKLYDHLVRKSKRNMPTGSNMGESKPWKAIKVDLLRCPRGSFAFAMLQWTGSRMFRRDLRWYALEEKNMMLDNHSLYDMTRGIQLPAKSEEEIFEHLGLEYLEPFERNA

SEQ ID NO: 4481 - DNA, 1584 bp, synthetic construct
  misc_feature 1..1584: note = Variant of terminal deoxynucleotidyltransferase
  source 1..1584: mol_type = other DNA
atgcaccatcatcatcatggcggtagcggcagccacggcattcgtaccatcgattcggacttcgggaagaaacagcagaaaaaaggcgataaccacgatagttccgccacttatgaaatcaaatttcacgagtttgtgctgttcattctcgaagaaaaaatgggtgcgacgcgtcgtacttttctgacagatttagcccgcaagaaagggttccgcgtcgagaatgaactgaccgacgaagttacccacatcgtggcagaaaatctgtcacgctctgaagtattggcttggctgaaagaacacaagatggagaagaccaagcaattcgaactgctggatattagctggcttatcgaaagcatgaaagttggtaaaccggtggacaccaaggggaaataccagttggcggaatcggttgaggtgagtgcgaacccagatccgacagaaggtcgtgtaaacgagctgcctcctactatgaaaaccgtttctccgtatgcgtgtcaacgccgcaccaccctgaacaaccgtaatcaacgttttacggactcgctggagattcttcgtgaaaattacgagctgaaaggcaacgacgatactgcgctggaatttcgtcgtgctatctccgtgctgaaaagccttccgtttgaggtacgtagcctgaaagacacggaaggattgccctggatcagtgatgaagtcaaagggattatggaagaaatcatcgaagtcggggagtcgcgtgaagtgcaggccgtgctcaatgatgagtggtatcaaagcttccacgcatttacgcgtgtctttggagtgggggtgaagacagcagacaagtggtaccgtatgggtctgcgcaccctcgaggatgttcgttccagcaagaccctgaagttgaccccgtggcagaaagtaggtctgctgtattatgaagatcttgctcgcggcgttacgcgtgccgaagctgacgcgatttggctgctggttcaggatgcagtcgcaactttcgacccggatgcgatcgtggagattgtcggtggatttcgtcgtgggaaacctcagggtcacgacgttgatctgcttatcagttctccgggagctgaaaaagagcaagaagaccaactcctgcagaaagtgatgaatctgtggaagaaacaagggttgttgctgtgtggtcgtctggaatggagtcagtgggaatgggggggttcgccttccggttctgctgatgagggtgacgcggaggcgtcgtgctttctgatcctcaaactttatgatcatctggtgcgtaaaagtaaacgcaatatgccgactggttcgaacatgggcgagtccaaaccgtggaaagcaattaaagtagatctgctgcgttgcccccgcggcagttttgcgtttgcgatgttgcagtggaccggaagccgcatgttccgtcgtgatctgcgctggtacgccctggaagagaagaacatgatgctggacaatcattcgctgtatgacatgactcgtggtatccaactccctgctaaatcggaagaggaaattttcgaacatctggggcttgaatacctggaaccgttcgaacgtaacgca

SEQ ID NO: 4482 - protein, 528 aa, synthetic construct
  REGION 1..528: note = Variant of terminal deoxynucleotidyltransferase
MHHHHHGGSGSHGIRTIDSDFGKKQQKKGDNHDSSATYEIKFHEFVLFILEEKMGATRRTFLTDLARKKGFRVENELTDEVTHIVAENLSRSEVLAWLKEHKMEKTKQFELLDISWLIESMKVGKPVDTKGKYQLAESVEVSANPDPTEGRVNELPPTMKTVSPYACQRRTTLNNRNQRFTDSLEILRENYELKGNDDTALEFRRAISVLKSLPFEVRSLKDTEGLPWISDEVKGIMEEIIEVGESREVQAVLNDEWYQSFHAFTRVFGVGVKTADKWYRMGLRTLEDVRSSKTLKLTPWQKVGLLYYEDLARGVTRAEADAIWLLVQDAVATFDPDAIVEIVGGFRRGKPQGHDVDLLISSPGAEKEQEDQLLQKVMNLWKKQGLLLCGRLEWSQWEWGGSPSGSADEGDAEASCFLILKLYDHLVRKSKRNMPTGSNMGESKPWKAIKVDLLRCPRGSFAFAMLQWTGSRMFRRDLRWYALEEKNMMLDNHSLYDMTRGIQLPAKSEEEIFEHLGLEYLEPFERNA

SEQ ID NO: 4483 - DNA, 1584 bp, synthetic construct
  misc_feature 1..1584: note = Variant of terminal deoxynucleotidyltransferase
  source 1..1584: mol_type = other DNA
atgcaccatcatcatcatggcggtagcggcagccacggcattcgtaccatcgattcggacttcgggaagaaacagcagaaaaaaggcgataaccacgatagttccgccacttatgaaatcaaatttcacgagtttgtgctgttcattctcgaagaaaaaatgggtgcgacgcgtcgtacttttctgacagatttagcccgcaagaaagggttccgcgtcgagaatgaactgaccgacgaagttacccacatcgtggcagaaaatctgtcacgctctgaagtattggcttggctgaaagaacacaagatggagaagaccaagcaattcgaactgctggatattagctggcttatcgaaagcatgaaagttggtaaaccggtggacaccaaggggaaataccagttggcggaatcggttgaggtgagtgcgaacccagatccgacagaaggtcgtgtaaacgagctgcctcctactatgaaaaccgtttctccgtatgcgtgtcaacgccgcaccaccctgaacaaccgtaatcaacgttttacggactcgctggagattcttcgtgaaaattacgagctgaaaggcaacgacgatactgcgctggaatttcgtcgtgctatctccgtgctgaaaagccttccgtttgaggtacgtagcctgaaagacacggaaggattgccctggatcagtgatgaagtcaaagggattatggaagaaatcatcgaagtcggggagtcgcgtgaagtgcaggccgtgctcaatgatgagtggtatcaaagcttccacgcatttacgcgtgtctttggagtgggggtgaagacagcagacaagtggtaccgtatgggtctgcgcaccctcgaggatgttcgttccagcaagaccctgaagttgaccccgtggcagaaagtaggtctgctgtatagggaagatcttgctcgcggcgttacgcgtgccgaagctgacgcgatttggctgctggttcaggatgcagtcgcaactttcgacccggatgcgatcgtggagattgtcggtggatttcgtcgtgggaaacctcagggtcacgacgttgatctgcttatcagttctccgggagctgaaaaagagcaagaagaccaactcctgcagaaagtgatgaatctgtggaagaaacaagggttgttgctgtgtggtcgtctggaatggagtcagtgggaatgggggggttcgccttccggtaaggctgatgagggtgacgcggaggcgtcgtgctttctgatcctcaaactttatgatcatctggtgcgtaaaagtaaacgcaatatgccgactggttcgaacatgggcgagtccaaaccgtggaaagcaattaaagtagatctgctgcgttgcccccgcggcagttttgcgtttgcgatgttgcagtggaccggaagccgcatgttccgtcgtgatctgcgctggtacgccctggaagagaagaacatgatgctggacaatcattcgctgtatgacatgactcgtggtatccaactccctgctaaatcggaagaggaaattttcgaacatctggggcttgaatacctggaaccgttcgaacgtaacgca

SEQ ID NO: 4484 - protein, 528 aa, synthetic construct
  REGION 1..528: note = Variant of terminal deoxynucleotidyltransferase
MHHHHHGGSGSHGIRTIDSDFGKKQQKKGDNHDSSATYEIKFHEFVLFILEEKMGATRRTFLTDLARKKGFRVENELTDEVTHIVAENLSRSEVLAWLKEHKMEKTKQFELLDISWLIESMKVGKPVDTKGKYQLAESVEVSANPDPTEGRVNELPPTMKTVSPYACQRRTTLNNRNQRFTDSLEILRENYELKGNDDTALEFRRAISVLKSLPFEVRSLKDTEGLPWISDEVKGIMEEIIEVGESREVQAVLNDEWYQSFHAFTRVFGVGVKTADKWYRMGLRTLEDVRSSKTLKLTPWQKVGLLYREDLARGVTRAEADAIWLLVQDAVATFDPDAIVEIVGGFRRGKPQGHDVDLLISSPGAEKEQEDQLLQKVMNLWKKQGLLLCGRLEWSQWEWGGSPSGKADEGDAEASCFLILKLYDHLVRKSKRNMPTGSNMGESKPWKAIKVDLLRCPRGSFAFAMLQWTGSRMFRRDLRWYALEEKNMMLDNHSLYDMTRGIQLPAKSEEEIFEHLGLEYLEPFERNA

SEQ ID NO: 4485 - DNA, 1584 bp, synthetic construct
  misc_feature 1..1584: note = Variant of terminal deoxynucleotidyltransferase
  source 1..1584: mol_type = other DNA
atgcaccatcatcatcatggcggtagcggcagccacggcattcgtaccatcgattcggacttcgggaagaaacagcagaaaaaaggcgataaccacgatagttccgccacttatgaaatcaaatttcacgagtttgtgctgttcattctcgaagaaaaaatgggtgcgacgcgtcgtacttttctgacagatttagcccgcaagaaagggttccgcgtcgagaatgaactgaccgacgaagttacccacatcgtggcagaaaatctgtcacgctctgaagtattggcttggctgaaagaacacaagatggagaagaccaagcaattcgaactgctggatattagctggcttatcgaaagcatgaaagttggtaaaccggtggacaccaaggggaaataccagttggcggaatcggttgaggtgagtgcgaacccagatccgacagaaggtcgtgtaaacgagctgcctcctactatgaaaaccgtttctccgtatgcgtgtcaacgccgcaccaccctgaacaaccgtaatcaacgttttacggactcgctggagattcttcgtgaaaattacgagctgaaaggcaacgacgatactgcgctggaatttcgtcgtgctatctccgtgctgaaaagccttccgtttgaggtacgtagcctgaaagacacggaaggattgccctggatcagtgatgaagtcaaagggattatggaagaaatcatcgaagtcggggagtcgcgtgaagtgcaggccgtgctcaatgatgagtggtatcaaagcttccacgcatttacgcgtgtctttggagtgggggtgaagacagcagacaagtggtaccgtatgggtctgcgcaccctcgaggatgttcgttccagcaagaccctgaagttgaccccgtggcagaaagtaggtctgctgtattatgaagatcttgctcgcggcgttacgcgtgccgaagctgacgcgatttggctgctggttcaggatgcagtcgcaactttcgacccggatgcgatcgtggagattgtcggtggatttcgtcgtcagaaacctcagggtcacgacgttgatctgcttatcagttctccgggagctgaaaaagagcaagaagaccaactcctgcagaaagtgatgaatctgtggaagaaacaagggttgttgctgtgtggtcgtctggaatggagtcagtgggaatgggggggttcgccttccggtaaggctgatgagggtgacgcggaggcgtcgtgctttctgatcctcaaactttatgatcatctggtgcgtaaaagtaaacgcaatatgccgactggttcgaacatgggcgagtccaaaccgtggaaagcaattaaagtagatctgctgcgttgcccccgcggcagttttgcgtttgcgatgttgcagtggaccggaagccgcatgttccgtcgtgatctgcgctggtacgccctggaagagaagaacatgatgctggacaatcattcgctgtatgacatgactcgtggtatccaactccctgctaaatcggaagaggaaattttcgaacatctggggcttgaatacctggaaccgttcgaacgtaacgca

SEQ ID NO: 4486 - protein, 528 aa, synthetic construct
  REGION 1..528: note = Variant of terminal deoxynucleotidyltransferase
MHHHHHGGSGSHGIRTIDSDFGKKQQKKGDNHDSSATYEIKFHEFVLFILEEKMGATRRTFLTDLARKKGFRVENELTDEVTHIVAENLSRSEVLAWLKEHKMEKTKQFELLDISWLIESMKVGKPVDTKGKYQLAESVEVSANPDPTEGRVNELPPTMKTVSPYACQRRTTLNNRNQRFTDSLEILRENYELKGNDDTALEFRRAISVLKSLPFEVRSLKDTEGLPWISDEVKGIMEEIIEVGESREVQAVLNDEWYQSFHAFTRVFGVGVKTADKWYRMGLRTLEDVRSSKTLKLTPWQKVGLLYYEDLARGVTRAEADAIWLLVQDAVATFDPDAIVEIVGGFRRQKPQGHDVDLLISSPGAEKEQEDQLLQKVMNLWKKQGLLLCGRLEWSQWEWGGSPSGKADEGDAEASCFLILKLYDHLVRKSKRNMPTGSNMGESKPWKAIKVDLLRCPRGSFAFAMLQWTGSRMFRRDLRWYALEEKNMMLDNHSLYDMTRGIQLPAKSEEEIFEHLGLEYLEPFERNA

SEQ ID NO: 4487 - DNA, 1584 bp, synthetic construct
  misc_feature 1..1584: note = Variant of terminal deoxynucleotidyltransferase
  source 1..1584: mol_type = other DNA
atgcaccatcatcatcatggcggtagcggcagccacggcattcgtaccatcgattcggacttcgggaagaaacagcagaaaaaaggcgataaccacgatagttccgccacttatgaaatcaaatttcacgagtttgtgctgttcattctcgaagaaaaaatgggtgcgacgcgtcgtacttttctgacagatttagcccgcaagaaagggttccgcgtcgagaatgaactgaccgacgaagttacccacatcgtggcagaaaatctgtcacgctctgaagtattggcttggctgaaagaacacaagatggagaagaccaagcaattcgaactgctggatattagctggcttatcgaaagcatgaaagttggtaaaccggtggacaccaaggggaaataccagttggcggaatcggttgaggtgagtgcgaacccagatccgacagaaggtcgtgtaaacgagctgcctcctactatgaaaaccgtttctccgtatgcgtgtcaacgccgcaccaccctgaacaaccgtaatcaacgttttacggactcgctggagattcttcgtgaaaattacgagctgaaaggcaacgacgatactgcgctggaatttcgtcgtgctatctccgtgctgaaaagccttccgtttgaggtacgtagcctgaaagacacggaaggattgccctggatcagtgatgaagtcaaagggattatggaagaaatcatcgaagtcggggagtcgcgtgaagtgcaggccgtgctcaatgatgagtggtatcaaagcttccacgcatttacgcgtgtctttggagtgggggtgaagacagcagacaagtggtaccgtatgggtctgcgcaccctcgaggatgttcgttccagcaagaccctgaagttgaccccgtggcagaaagtaggtctgctgtattatgaagatcttgctcgcggcgttacgcgtgccgaagctgacgcgatttggctgctggttcaggatgcagtcgcaactttcgacccggatgcgatcgtggagattgtcggtggatttcgtcgtgggaaacctcagggtcacgacgttgatctgcttatcagttctccgggagctgaaaaagagcaagaagaccaactcctgcagaaagtgatgaatctgtggaagaaacaagggttgttgctgtgtggtcgtagggaatggagtcagtgggaatgggggggttcgccttccggtaaggctgatgagggtgacgcggaggcgtcgtgctttctgatcctcaaactttatgatcatctggtgcgtaaaagtaaacgcaatatgccgactggttcgaacatgggcgagtccaaaccgtggaaagcaattaaagtagatctgctgcgttgcccccgcggcagttttgcgtttgcgatgttgcagtggaccggaagccgcatgttccgtcgtgatctgcgctggtacgccctggaagagaagaacatgatgctggacaatcattcgctgtatgaccctagtcgtggtatcggtctccctgctaaatcggaagaggaaattttcgaacatctggggcttgaatacctggaaccgttcgaacgtaacgca

SEQ ID NO: 4488 - protein, 528 aa, synthetic construct
  REGION 1..528: note = Variant of terminal deoxynucleotidyltransferase
MHHHHHGGSGSHGIRTIDSDFGKKQQKKGDNHDSSATYEIKFHEFVLFILEEKMGATRRTFLTDLARKKGFRVENELTDEVTHIVAENLSRSEVLAWLKEHKMEKTKQFELLDISWLIESMKVGKPVDTKGKYQLAESVEVSANPDPTEGRVNELPPTMKTVSPYACQRRTTLNNRNQRFTDSLEILRENYELKGNDDTALEFRRAISVLKSLPFEVRSLKDTEGLPWISDEVKGIMEEIIEVGESREVQAVLNDEWYQSFHAFTRVFGVGVKTADKWYRMGLRTLEDVRSSKTLKLTPWQKVGLLYYEDLARGVTRAEADAIWLLVQDAVATFDPDAIVEIVGGFRRGKPQGHDVDLLISSPGAEKEQEDQLLQKVMNLWKKQGLLLCGRREWSQWEWGGSPSGKADEGDAEASCFLILKLYDHLVRKSKRNMPTGSNMGESKPWKAIKVDLLRCPRGSFAFAMLQWTGSRMFRRDLRWYALEEKNMMLDNHSLYDPSRGIGLPAKSEEEIFEHLGLEYLEPFERNA

SEQ ID NO: 4489 - DNA, 1584 bp, synthetic construct
  misc_feature 1..1584: note = Variant of terminal deoxynucleotidyltransferase
  source 1..1584: mol_type = other DNA
atgcaccatcatcatcatggcggtagcggcagccacggcattcgtaccatcgattcggacttcgggaagaaacagcagaaaaaaggcgataaccacgatagttccgccacttatgaaatcaaatttcacgagtttgtgctgttcattctcgaagaaaaaatgggtgcgacgcgtcgtacttttctgacagatttagcccgcaagaaagggttccgcgtcgagaatgaactgaccgacgaagttacccacatcgtggcagaaaatctgtcacgctctgaagtattggcttggctgaaagaacacaagatggagaagaccaagcaattcgaactgctggatattagctggcttatcgaaagcatgaaagttggtaaaccggtggacaccaaggggaaataccagttggcggaatcggttgaggtgagtgcgaacccagatccgacagaaggtcgtgtaaacgagctgcctcctactatgaaaaccgtttctccgtatgcgtgtcaacgccgcaccaccctgaacaaccgtaatcaacgttttacggactcgctggagattcttcgtgaaaattactatctgaaaggcaacgacgatactgcgctggaatttcgtcgtgctatctccgtgctgaaaagccttccgtttgaggtacgtagcctgaaagacacggaaggattgccctggatcagtgatgaagtcaaagggattatggaagaaatcatcgaagtcggggagtcgcgtgaagtgcaggccgtgctcaatgatgagtggtatcaaagcttccacgcatttacgcgtgtctttggagtgggggtgaagacagcagacaagtggtaccgtatgggtctgcgcaccctcgaggatgttcgttccagcaagaccctgaagttgaccccgtggcagaaagtaggtctgctgtattatgaagatcttgctcgcggcgttacgcgtgccgaagctgacgcgatttggctgctggttcaggatgcagtcgcaactttcgacccggatgcgatcgtggagattgtcggtggatttcgtcgtgggaaacctcagggtcacgacgttgatctgcttatcagttctccgggagctgaaaaagagcaagaagaccaactcctgcagaaagtgatgaatctgtggaagaaacaagggttgttgctgtgtggtcgtctggaatggagtcagtgggaatgggggggttcgccttccggtaaggctgatgagggtgacgcggaggcgtcgtgctttctgatcctcaaactttatgatcatctggtgcgtaaaagtaaacgcaatatgccgactggttcgaacatgggcgagtccaaaccgtggaaagcaattaaagtagatctgctgcgttgcccccgcggcagttttgcgtttgcgatgttgcagtggaccggaagccgcatgttccgtcgtgatctgcgctggtacgccctggaagagaagaacatgatgctggacaatcattcgctgtatgacatgactcgtggtatccaactccctgctaaatcggaagaggaaattttcgaacatctggggcttgaatacctggaaccgttcgaacgtaacgca

SEQ ID NO: 4490 - protein, 528 aa, synthetic construct
  REGION 1..528: note = Variant of terminal deoxynucleotidyltransferase
MHHHHHGGSGSHGIRTIDSDFGKKQQKKGDNHDSSATYEIKFHEFVLFILEEKMGATRRTFLTDLARKKGFRVENELTDEVTHIVAENLSRSEVLAWLKEHKMEKTKQFELLDISWLIESMKVGKPVDTKGKYQLAESVEVSANPDPTEGRVNELPPTMKTVSPYACQRRTTLNNRNQRFTDSLEILRENYYLKGNDDTALEFRRAISVLKSLPFEVRSLKDTEGLPWISDEVKGIMEEIIEVGESREVQAVLNDEWYQSFHAFTRVFGVGVKTADKWYRMGLRTLEDVRSSKTLKLTPWQKVGLLYYEDLARGVTRAEADAIWLLVQDAVATFDPDAIVEIVGGFRRGKPQGHDVDLLISSPGAEKEQEDQLLQKVMNLWKKQGLLLCGRLEWSQWEWGGSPSGKADEGDAEASCFLILKLYDHLVRKSKRNMPTGSNMGESKPWKAIKVDLLRCPRGSFAFAMLQWTGSRMFRRDLRWYALEEKNMMLDNHSLYDMTRGIQLPAKSEEEIFEHLGLEYLEPFERNA

SEQ ID NO: 4491 - DNA, 1584 bp, synthetic construct
  misc_feature 1..1584: note = Variant of terminal deoxynucleotidyltransferase
  source 1..1584: mol_type = other DNA
atgcaccatcatcatcatggcggtagcggcagccacggcattcgtaccatcgattcggacttcgggaagaaacagcagaaaaaaggcgataaccacgatagttccgccacttatgaaatcaaatttcacgagtttgtgctgttcattctcgaagaaaaaatgggtgcgacgcgtcgtacttttctgacagatttagcccgcaagaaagggttccgcgtcgagaatgaactgaccgacgaagttacccacatcgtggcagaaaatctgtcacgctctgaagtattggcttggctgaaagaacacaagatggagaagaccaagcaattcgaactgctggatattagctggcttatcgaaagcatgaaagttggtaaaccggtggacaccaaggggaaataccagttggcggaatcggttgaggtgagtgcgaacccagatccgacagaaggtcgtgtaaacgagctgcctcctactatgaaaaccgtttctccgtatgcgtgtcaacgccgcaccaccctgaacaaccgtaatcaacgttttacggactcgctggagattcttcgtgaaaattacgagctgaaaggcaacgacgatactgcgctggaatttcgtcgtgctatctccgtgctgaaaagccttccgtttgaggtacgtagcctgaaagacacggaaggattgccctggatcagtgatgaagtcaaagggattatggaagaaatcatcgaagtcggggagtcgcgtgaagtgcaggccgtgctcaatgatgagtggtatcaaagcttccacgcatttacgcgtgtctttggagtgggggtgaagacagcagacaagtggtaccgtatgggtctgcgcaccctcgaggatgttcgttccagcaagaccctgaagttgaccccgtggcagaaagtaggtctgctgtatactgaagatcttgctcgcggcgttacgcgtgccgaagctgacgcgatttggctgctggttcaggatgcagtcgcaactttcgacccggatgcgatcgtggagattgtcggtggatttcgtcgtgggaaacctcagggtcacgacgttgatctgcttatcagttctccgggagctgaaaaagagcaagaagaccaactcctgcagaaagtgatgaatctgtggaagaaacaagggttgttgctgtgtggtcgtctggaatggagtcagtgggaatgggggggttcgccttccggtaaggctgatgagggtgacgcggaggcgtcgtgctttctgatcctcaaactttatgatcatctggtgcgtaaaagtaaacgcaatatgccgactggttcgaacatgggcgagtccaaaccgtggaaagcaattaaagtagatctgctgcgttgcccccgcggcagttttgcgtttgcgatgttgcagtggaccggaagccgcatgttccgtcgtgatctgcgctggtacgccctggaagagaagaacatgatgctggacaatcattcgctgtatgacatgactcgtggtatccaactccctgctaaatcggaagaggaaattttcgaacatctggggcttgaatacctggaaccgttcgaacgtaacgca

SEQ ID NO: 4492 - protein, 528 aa, synthetic construct
  REGION 1..528: note = Variant of terminal deoxynucleotidyltransferase
MHHHHHGGSGSHGIRTIDSDFGKKQQKKGDNHDSSATYEIKFHEFVLFILEEKMGATRRTFLTDLARKKGFRVENELTDEVTHIVAENLSRSEVLAWLKEHKMEKTKQFELLDISWLIESMKVGKPVDTKGKYQLAESVEVSANPDPTEGRVNELPPTMKTVSPYACQRRTTLNNRNQRFTDSLEILRENYELKGNDDTALEFRRAISVLKSLPFEVRSLKDTEGLPWISDEVKGIMEEIIEVGESREVQAVLNDEWYQSFHAFTRVFGVGVKTADKWYRMGLRTLEDVRSSKTLKLTPWQKVGLLYTEDLARGVTRAEADAIWLLVQDAVATFDPDAIVEIVGGFRRGKPQGHDVDLLISSPGAEKEQEDQLLQKVMNLWKKQGLLLCGRLEWSQWEWGGSPSGKADEGDAEASCFLILKLYDHLVRKSKRNMPTGSNMGESKPWKAIKVDLLRCPRGSFAFAMLQWTGSRMFRRDLRWYALEEKNMMLDNHSLYDMTRGIQLPAKSEEEIFEHLGLEYLEPFERNA

SEQ ID NO: 4493 - DNA, 1584 bp, synthetic construct
  misc_feature 1..1584: note = Variant of terminal deoxynucleotidyltransferase
  source 1..1584: mol_type = other DNA
atgcaccatcatcatcatggcggtagcggcagccacggcattcgtaccatcgattcggacttcgggaagaaacagcagaaaaaaggcgataaccacgatagttccgccacttatgaaatcaaatttcacgagtttgtgctgttcattctcgaagaaaaaatgggtgcgacgcgtcgtacttttctgacagatttagcccgcaagaaagggttccgcgtcgagaatgaactgaccgacgaagttacccacatcgtggcagaaaatctgtcacgctctgaagtattggcttggctgaaagaacacaagatggagaagaccaagcaattcgaactgctggatattagctggcttatcgaaagcatgaaagttggtaaaccggtggacaccaaggggaaataccagttggcggaatcggttgaggtgagtgcgaacccagatccgacagaaggtcgtgtaaacgagctgcctcctactatgaaaaccgtttctccgtatgcgtgtcaacgccgcaccaccctgaacaaccgtaatcaacgttttacggactcgctggagattcttcgtgaaaattacgagctgaaaggcaacgacgatactgcgctggaatttcgtcgtgctatctccgtgctgaaaagccttccgtttgaggtacgtagcctgaaagacacggaaggattgccctggatcagtgatgaagtcaaagggattatggaagaaatcatcgaagtcggggagtcgcgtgaagtgcaggccgtgctcaatgatgagtggtatcaaagcttccacgcatttacgcgtgtctttggagtgggggtgaagacagcagacaagtggtaccgtatgggtctgcgcaccctcgaggatgttcgttccagcaagaccctgaagttgaccccgtggcagaaagtaggtctgctgtattatgaagatcttgctcgcggcgttacgcgtgccgaagctgacgcgatttggctgctggttcaggatgcagtcgcaactttcgacccggatgcgatcgtggagatttgtggtggatttcgtcgtgggaaacctcagggtcacgacgttgatctgcttatcagttctccgggagctgaaaaagagcaagaagaccaactcctgcagaaagtgatgaatctgtggaagaaacaagggttgttgctgtgtggtcgtctggaatggagtcagtgggaatgggggggttcgccttccggtaaggctgatgagggtgacgcggaggcgtcgtgctttctgatcctcaaactttatgatcatctggtgcgtaaaagtaaacgcaatatgccgactggttcgaacatgggcgagtccaaaccgtggaaagcaattaaagtagatctgctgcgttgcccccgcggcagttttgcgtttgcgatgttgcagtggaccggaagccgcatgttccgtcgtgatctgcgctggtacgccctggaagagaagaacatgatgctggacaatcattcgctgtatgacatgactcgtggtatccaactccctgctaaatcggaagaggaaattttcgaacatctggggcttgaatacctggaaccgttcgaacgtaacgca

SEQ ID NO: 4494 - protein, 528 aa, synthetic construct
  REGION 1..528: note = Variant of terminal deoxynucleotidyltransferase
MHHHHHGGSGSHGIRTIDSDFGKKQQKKGDNHDSSATYEIKFHEFVLFILEEKMGATRRTFLTDLARKKGFRVENELTDEVTHIVAENLSRSEVLAWLKEHKMEKTKQFELLDISWLIESMKVGKPVDTKGKYQLAESVEVSANPDPTEGRVNELPPTMKTVSPYACQRRTTLNNRNQRFTDSLEILRENYELKGNDDTALEFRRAISVLKSLPFEVRSLKDTEGLPWISDEVKGIMEEIIEVGESREVQAVLNDEWYQSFHAFTRVFGVGVKTADKWYRMGLRTLEDVRSSKTLKLTPWQKVGLLYYEDLARGVTRAEADAIWLLVQDAVATFDPDAIVEICGGFRRGKPQGHDVDLLISSPGAEKEQEDQLLQKVMNLWKKQGLLLCGRLEWSQWEWGGSPSGKADEGDAEASCFLILKLYDHLVRKSKRNMPTGSNMGESKPWKAIKVDLLRCPRGSFAFAMLQWTGSRMFRRDLRWYALEEKNMMLDNHSLYDMTRGIQLPAKSEEEIFEHLGLEYLEPFERNA

SEQ ID NO: 4495 - DNA, 1584 bp, synthetic construct
  misc_feature 1..1584: note = Variant of terminal deoxynucleotidyltransferase
  source 1..1584: mol_type = other DNA
atgcaccatcatcatcatggcggtagcggcagccacggcattcgtaccatcgattcggacttcgggaagaaacagcagaaaaaaggcgataaccacgatagttccgccacttatgaaatcaaatttcacgagtttgtgctgttcattctcgaagaaaaaatgggtgcgacgcgtcgtacttttctgacagatttagcccgcaagaaagggttccgcgtcgagaatgaactgaccgacgaagttacccacatcgtggcagaaaatctgtcacgctctgaagtattggcttggctgaaagaacacaagatggagaagaccaagcaattcgaactgctggatattagctggcttatcgaaagcatgaaagttggtaaaccggtggacaccaaggggaaataccagttggcggaatcggttgaggtgagtgcgaacccagatccgacagaaggtcgtgtaaacgagctgcctcctactatgaaaaccgtttctccgtatgcgtgtcaacgccgcaccaccctgaacaaccgtaatcaacgttttacggactcgctggagattcttcgtgaaaattacgagctgaaaggcaacgacgatactgcgctggaatttcgtcgtgctatctccgtgctgaaaagccttccgtttgaggtacgtagcctgaaagacacggaaggattgccctggatcagtgatgaagtcaaagggattatggaagaaatcatcgaagtcggggagtcgcgtgaagtgcaggccgtgctcaatgatgagtggtatcaaagcttccacgcatttacgcgtgtctttggagtgggggtgaagacagcagacaagtggtaccgtatgggtctgcgcaccctcgaggatgttcgttccagcaagaccctgccgttgaccccgtggcagaaagtaggtctgctgtattatgaagatcttgctcgcggcgttacgcgtgccgaagctgacgcgatttggctgctggttcaggatgcagtcgcaactttcgacccggatgcgatcgtggagattgtcggtggatttcgtcgtgggaaacctcagggtcacgacgttgatctgcttatcagttctccgggagctgaaaaagagcaagaagaccaactcctgcagaaagtgatgaatctgtggaagaaacaagggttgttgctgtgtggtcgtctggaatggagtcagtgggaatgggggggttcgccttccggtaaggctgatgagggtgacgcggaggcgtcgtgctttctgatcctcaaactttatgatcatctggtgcgtaaaagtaaacgcaatatgccgactggttcgaacatgggcgagtccaaaccgtggaaagcaattaaagtagatctgctgcgttgcccccgcggcagttttgcgtttgcgatgttgcagtggaccggaagccgcatgttccgtcgtgatctgcgctggtacgccctggaagagaagaacatgatgctggacaatcattcgctgtatgacatgactcgtggtatccaactccctgctaaatcggaagaggaaattttcgaacatctggggcttgaatacctggaaccgttcgaacgtaacgca

SEQ ID NO: 4496 - protein, 528 aa, synthetic construct
  REGION 1..528: note = Variant of terminal deoxynucleotidyltransferase
MHHHHHGGSGSHGIRTIDSDFGKKQQKKGDNHDSSATYEIKFHEFVLFILEEKMGATRRTFLTDLARKKGFRVENELTDEVTHIVAENLSRSEVLAWLKEHKMEKTKQFELLDISWLIESMKVGKPVDTKGKYQLAESVEVSANPDPTEGRVNELPPTMKTVSPYACQRRTTLNNRNQRFTDSLEILRENYELKGNDDTALEFRRAISVLKSLPFEVRSLKDTEGLPWISDEVKGIMEEIIEVGESREVQAVLNDEWYQSFHAFTRVFGVGVKTADKWYRMGLRTLEDVRSSKTLPLTPWQKVGLLYYEDLARGVTRAEADAIWLLVQDAVATFDPDAIVEIVGGFRRGKPQGHDVDLLISSPGAEKEQEDQLLQKVMNLWKKQGLLLCGRLEWSQWEWGGSPSGKADEGDAEASCFLILKLYDHLVRKSKRNMPTGSNMGESKPWKAIKVDLLRCPRGSFAFAMLQWTGSRMFRRDLRWYALEEKNMMLDNHSLYDMTRGIQLPAKSEEEIFEHLGLEYLEPFERNA

SEQ ID NO: 4497 - DNA, 1584 bp, synthetic construct
  misc_feature 1..1584: note = Variant of terminal deoxynucleotidyltransferase
  source 1..1584: mol_type = other DNA
atgcaccatcatcatcatggcggtagcggcagccacggcattcgtaccatcgattcggacttcgggaagaaacagcagaaaaaaggcgataaccacgatagttccgccacttatgaaatcaaatttcacgagtttgtgctgttcattctcgaagaaaaaatgggtgcgacgcgtcgtacttttctgacagatttagcccgcaagaaagggttccgcgtcgagaatgaactgaccgacgaagttacccacatcgtggcagaaaatctgtcacgctctgaagtattggcttggctgaaagaacacaagatggagaagaccaagcaattcgaactgctggatattagctggcttatcgaaagcatgaaagttggtaaaccggtggacaccaaggggaaataccagttggcggaatcggttgaggtgagtgcgaacccagatccgacagaaggtcgtgtaaacgagctgcctcctactatgaaaaccgtttctccgtatgcgtgtcaacgccgcaccaccctgaacaaccgtaatcaacgttttacggactcgctggagattcttcgtgaaaattacgagctgaaaggcaacgacgatactgcgctggaatttcgtcgtgctatctccgtgctgaaaagccttccgtttgaggtacgtagcctgaaagacacggaaggattgccctggatcagtgatgaagtcaaagggattatggaagaaatcatcgaagtcggggagtcgcgtgaagtgcaggccgtgctcaatgatgagtggtatcaaagcttccacgcatttacgcgtgtctttggagtgggggtgaagacagcagacaagtggtaccgtatgggtctgcgcaccctcgaggatgttcgttccagcaagaccctgaagttgaccccgtggcagaaagtaggtctgctgtattatgaagatcttgctcgcggcgttacgcgtgccgaagctgacgcgatttggctgctggttcaggatgcagtcgcaactttcgacccggatgcgatcgtggagattgtcggtggatttcgtcgtgggaaacctcagggtcacgacgttgatctgattatcagttctccgggagctgaaaaagagcaagaagaccaactcctgcagaaagtgatgaatctgtggaagaaacaagggttgttgctgtgtggtcgtctggaatggagtcagtgggaatgggggggttcgccttccggtaaggctgatgagggtgacgcggaggcgtcgtgctttctgatcctcaaactttatgatcatctggtgcgtaaaagtaaacgcaatatgccgactggttcgaacatgggcgagtccaaaccgtggaaagcaattaaagtagatctgctgcgttgcccccgcggcagttttgcgtttgcgatgttgcagtggaccggaagccgcatgttccgtcgtgatctgcgctggtacgccctggaagagaagaacatgatgctggacaatcattcgctgtatgaccctagtcgtggtatcggtctccctgctaaatcggaagaggaaattttcgaacatctggggcttgaatacctggaaccgttcgaacgtaacgca

SEQ ID NO: 4498 - protein, 528 aa, synthetic construct
  REGION 1..528: note = Variant of terminal deoxynucleotidyltransferase
MHHHHHGGSGSHGIRTIDSDFGKKQQKKGDNHDSSATYEIKFHEFVLFILEEKMGATRRTFLTDLARKKGFRVENELTDEVTHIVAENLSRSEVLAWLKEHKMEKTKQFELLDISWLIESMKVGKPVDTKGKYQLAESVEVSANPDPTEGRVNELPPTMKTVSPYACQRRTTLNNRNQRFTDSLEILRENYELKGNDDTALEFRRAISVLKSLPFEVRSLKDTEGLPWISDEVKGIMEEIIEVGESREVQAVLNDEWYQSFHAFTRVFGVGVKTADKWYRMGLRTLEDVRSSKTLKLTPWQKVGLLYYEDLARGVTRAEADAIWLLVQDAVATFDPDAIVEIVGGFRRGKPQGHDVDLIISSPGAEKEQEDQLLQKVMNLWKKQGLLLCGRLEWSQWEWGGSPSGKADEGDAEASCFLILKLYDHLVRKSKRNMPTGSNMGESKPWKAIKVDLLRCPRGSFAFAMLQWTGSRMFRRDLRWYALEEKNMMLDNHSLYDPSRGIGLPAKSEEEIFEHLGLEYLEPFERNA

SEQ ID NO: 4499 - DNA, 1584 bp, synthetic construct
  misc_feature 1..1584: note = Variant of terminal deoxynucleotidyltransferase
  source 1..1584: mol_type = other DNA
atgcaccatcatcatcatggcggtagcggcagccacggcattcgtaccatcgattcggacttcgggaagaaacagcagaaaaaaggcgataaccacgatagttccgccacttatgaaatcaaatttcacgagtttgtgctgttcattctcgaagaaaaaatgggtgcgacgcgtcgtacttttctgacagatttagcccgcaagaaagggttccgcgtcgagaatgaactgaccgacgaagttacccacatcgtggcagaaaatctgtcacgctctgaagtattggcttggctgaaagaacacaagatggagaagaccaagcaattcgaactgctggatattagctggcttatcgaaagcatgaaagttggtaaaccggtggacaccaaggggaaataccagttggcggaatcggttgaggtgagtgcgaacccagatccgacagaaggtcgtgtaaacgagctgcctcctactatgaaaaccgtttctccgtatgcgtgtcaacgccgcaccaccctgaacaaccgtaatcaacgttttacggactcgctggagattcttcgtgaaaattacgagctgaaaggcaacgacgatactgcgctggaatttcgtcgtgctatctccgtgctgaaaagccttccgtttgaggtacgtagcctgaaagacacggaaggattgccctggatcagtgatgaagtcaaagggattatggaagaaatcatcgaagtcggggagtcgcgtgaagtgcaggccgtgctcaatgatgagtggtatcaaagcttccacgcatttacgcgtgtctttggagtgggggtgaagacagcagacaagtggtaccgtatgggtctgcgcaccctcgaggatgttcgttccagcaagaccctgaagttgaccccgtggcagaaagtaggtctgctgtattatgaagatcttgctcgcggcgttacgcgtgccgaagctgacgcgatttggctgctggttcaggatgcagtcgcaactttcgacccggatgcgatcgtggagattgtcggtggatttcgtcgtgggaaacctcagggtcacgacgttgatctgcttatcagttctccgggagctgaaaaagagcaagaagaccaactcctgcagaaagtgatgaatctgtggaagaaacaagggttgttgctgtgtggtcgtctggaatggagtcagtgggaatgggggggttcgccttccggtaaggctgatgagggtgacgcggaggcgtcgtgctttctgatcctcaaactttatgatcatctggtgcgtaaaagtaaacgcaatatgccgactggttcgaacatgggcgagtccaaaccgtggaaagcaattaaagtagatctgctgcgttgcccccgcggcagttttgcgtttgcggagttgcagtggaccggaagccgcatgttccgtcgtgatctgcgctggtacgccctggaagagaagaacatgatgctggacaatcattcgctgtatgacatgactcgtggtatccaactccctgctaaatcggaagaggaaattttcgaacatctggggcttgaatacctggaaccgttcgaacgtaacgca

SEQ ID NO: 4500 - protein, 528 aa, synthetic construct
  REGION 1..528: note = Variant of terminal deoxynucleotidyltransferase
MHHHHHGGSGSHGIRTIDSDFGKKQQKKGDNHDSSATYEIKFHEFVLFILEEKMGATRRTFLTDLARKKGFRVENELTDEVTHIVAENLSRSEVLAWLKEHKMEKTKQFELLDISWLIESMKVGKPVDTKGKYQLAESVEVSANPDPTEGRVNELPPTMKTVSPYACQRRTTLNNRNQRFTDSLEILRENYELKGNDDTALEFRRAISVLKSLPFEVRSLKDTEGLPWISDEVKGIMEEIIEVGESREVQAVLNDEWYQSFHAFTRVFGVGVKTADKWYRMGLRTLEDVRSSKTLKLTPWQKVGLLYYEDLARGVTRAEADAIWLLVQDAVATFDPDAIVEIVGGFRRGKPQGHDVDLLISSPGAEKEQEDQLLQKVMNLWKKQGLLLCGRLEWSQWEWGGSPSGKADEGDAEASCFLILKLYDHLVRKSKRNMPTGSNMGESKPWKAIKVDLLRCPRGSFAFAELQWTGSRMFRRDLRWYALEEKNMMLDNHSLYDMTRGIQLPAKSEEEIFEHLGLEYLEPFERNA

SEQ ID NO: 4501 - DNA, 1584 bp, synthetic construct
  misc_feature 1..1584: note = Variant of terminal deoxynucleotidyltransferase
  source 1..1584: mol_type = other DNA
atgcaccatcatcatcatggcggtagcggcagccacggcattcgtaccatcgattcggacttcgggaagaaacagcagaaaaaaggcgataaccacgatagttccgccacttatgaaatcaaatttcacgagtttgtgctgttcattctcgaagaaaaaatgggtgcgacgcgtcgtacttttctgacagatttagcccgcaagaaagggttccgcgtcgagaatgaactgaccgacgaagttacccacatcgtggcagaaaatctgtcacgctctgaagtattggcttggctgaaagaacacaagatggagaagaccaagcaattcgaactgctggatattagctggcttatcgaaagcatgaaagttggtaaaccggtggacaccaaggggaaataccagttggcggaatcggttgaggtgagtgcgaacccagatccgacagaaggtcgtgtaaacgagctgcctcctactatgaaaaccgtttctccgtatgcgtgtcaacgccgcaccaccctgaacaaccgtaatcaacgttttacggactcgctggagattcttcgtgaaaattacgagctgaaaggcaacgacgatactgcgctggaatttcgtcgtgctatctccgtgctgaaaagccttccgtttgaggtacgtagcctgaaagacacggaaggattgccctggatcagtgatgaagtcaaagggattatggaagaaatcatcgaagtcggggagtcgcgtgaagtgcaggccgtgctcaatgatgagtggtatcaaagcttccacgcatttacgcgtgtctttggagtgggggtgaagacagcagacaagtggtaccgtatgggtctgcgcaccctcgaggatgttcgttccagcaagaccctgaagttgaccccgtggcagaaagtaggtctgctgtattatgaagatcttgctcgcggcgttacgcgtgccgaagctgacgcgatttggctgctggttcaggatgcagtcgcaactttcgacccggatgcgatcgtggagattgtcggtggatttcgtcgtgggaaacctcagggtcacgacgttgatctgcttatcagttctccgggagctgaaaaagagcaagaagaccaactcctgcagaaagtgatgaatctgtggaagaaacaagggttgttgctgtgtggtcgtctggaatggagtcagtgggaatgggggggttcgccttccggtaaggctgatgagggtgaggcggaggcgtcgtgctttctgatcctcaaactttatgatcatctggtgcgtaaaagtaaacgcaatatgccgactggttcgaacatgggcgagtccaaaccgtggaaagcaattaaagtagatctgctgcgttgcccccgcggcagttttgcgtttgcgatgttgcagtggaccggaagccgcatgttccgtcgtgatctgcgctggtacgccctggaagagaagaacatgatgctggacaatcattcgctgtatgacatgactcgtggtatccaactccctgctaaatcggaagaggaaattttcgaacatctggggcttgaatacctggaaccgttcgaacgtaacgca

SEQ ID NO: 4502 - protein, 528 aa, synthetic construct
  REGION 1..528: note = Variant of terminal deoxynucleotidyltransferase
MHHHHHGGSGSHGIRTIDSDFGKKQQKKGDNHDSSATYEIKFHEFVLFILEEKMGATRRTFLTDLARKKGFRVENELTDEVTHIVAENLSRSEVLAWLKEHKMEKTKQFELLDISWLIESMKVGKPVDTKGKYQLAESVEVSANPDPTEGRVNELPPTMKTVSPYACQRRTTLNNRNQRFTDSLEILRENYELKGNDDTALEFRRAISVLKSLPFEVRSLKDTEGLPWISDEVKGIMEEIIEVGESREVQAVLNDEWYQSFHAFTRVFGVGVKTADKWYRMGLRTLEDVRSSKTLKLTPWQKVGLLYYEDLARGVTRAEADAIWLLVQDAVATFDPDAIVEIVGGFRRGKPQGHDVDLLISSPGAEKEQEDQLLQKVMNLWKKQGLLLCGRLEWSQWEWGGSPSGKADEGEAEASCFLILKLYDHLVRKSKRNMPTGSNMGESKPWKAIKVDLLRCPRGSFAFAMLQWTGSRMFRRDLRWYALEEKNMMLDNHSLYDMTRGIQLPAKSEEEIFEHLGLEYLEPFERNA

SEQ ID NO: 4503 - DNA, 1584 bp, synthetic construct
  misc_feature 1..1584: note = Variant of terminal deoxynucleotidyltransferase
  source 1..1584: mol_type = other DNA
atgcaccatcatcatcatggcggtagcggcagccacggcattcgtaccatcgattcggacttcgggaagaaacagcagaaaaaaggcgataaccacgatagttccgccacttatgaaatcaaatttcacgagtttgtgctgttcattctcgaagaaaaaatgggtgcgacgcgtcgtacttttctgacagatttagcccgcaagaaagggttccgcgtcgagaatgaactgaccgacgaagttacccacatcgtggcagaaaatctgtcacgctctgaagtattggcttggctgaaagaacacaagatggagaagaccaagcaattcgaactgctggatattagctggcttatcgaaagcatgaaagttggtaaaccggtggacaccaaggggaaataccagttggcggaatcggttgaggtgagtgcgaacccagatccgacagaaggtcgtgtaaacgagctgcctcctactatgaaaaccgtttctccgtatgcgtgtcaacgccgcaccaccctgaacaaccgtaatcaacgttttacggactcgctggagattcttcgtgaaaattacgagctgaaaggcaacgacgatactgcgctggaatttcgtcgtgctatctccgtgctgaaaagccttccgtttgaggtacgtagcctgaaagacacggaaggattgccctggatcagtgatgaagtcaaagggattatggaagaaatcatcgaagtcggggagtcgcgtgaagtgcaggccgtgctcaatgatgagtggtatcaaagcttccacgcatttacgcgtgtctttggagtgggggtgaagacagcagacaagtggtacggtatgggtctgcgcaccctcgaggatgttcgttccagcaagaccctgaagttgaccccgtggcagaaagtaggtctgctgtattatgaagatcttgctcgcggcgttacgcgtgccgaagctgacgcgatttggctgctggttcaggatgcagtcgcaactttcgacccggatgcgatcgtggagattgtcggtggatttcgtcgtgggaaacctcagggtcacgacgttgatctgcttatcagttctccgggagctgaaaaagagcaagaagaccaactcctgcagaaagtgatgaatctgtggaagaaacaagggttgttgctgtgtggtcgtctggaatggagtcagtgggaatgggggggttcgccttccggtaaggctgatgagggtgacgcggaggcgtcgtgctttctgatcctcaaactttatgatcatctggtgcgtaaaagtaaacgcaatatgccgactggttcgaacatgggcgagtccaaaccgtggaaagcaattaaagtagatctgctgcgttgcccccgcggcagttttgcgtttgcgatgttgcagtggaccggaagccgcatgttccgtcgtgatctgcgctggtacgccctggaagagaagaacatgatgctggacaatcattcgctgtatgaccctagtcgtggtatcggtctccctgctaaatcggaagaggaaattttcgaacatctggggcttgaatacctggaaccgttcgaacgtaacgca

SEQ ID NO: 4504 - protein, 528 aa, synthetic construct
  REGION 1..528: note = Variant of terminal deoxynucleotidyltransferase
MHHHHHGGSGSHGIRTIDSDFGKKQQKKGDNHDSSATYEIKFHEFVLFILEEKMGATRRTFLTDLARKKGFRVENELTDEVTHIVAENLSRSEVLAWLKEHKMEKTKQFELLDISWLIESMKVGKPVDTKGKYQLAESVEVSANPDPTEGRVNELPPTMKTVSPYACQRRTTLNNRNQRFTDSLEILRENYELKGNDDTALEFRRAISVLKSLPFEVRSLKDTEGLPWISDEVKGIMEEIIEVGESREVQAVLNDEWYQSFHAFTRVFGVGVKTADKWYGMGLRTLEDVRSSKTLKLTPWQKVGLLYYEDLARGVTRAEADAIWLLVQDAVATFDPDAIVEIVGGFRRGKPQGHDVDLLISSPGAEKEQEDQLLQKVMNLWKKQGLLLCGRLEWSQWEWGGSPSGKADEGDAEASCFLILKLYDHLVRKSKRNMPTGSNMGESKPWKAIKVDLLRCPRGSFAFAMLQWTGSRMFRRDLRWYALEEKNMMLDNHSLYDPSRGIGLPAKSEEEIFEHLGLEYLEPFERNA

SEQ ID NO: 4505 - DNA, 1584 bp, synthetic construct
  misc_feature 1..1584: note = Variant of terminal deoxynucleotidyltransferase
  source 1..1584: mol_type = other DNA
atgcaccatcatcatcatggcggtagcggcagccacggcattcgtaccatcgattcggacttcgggaagaaacagcagaaaaaaggcgataaccacgatagttccgccacttatgaaatcaaatttcacgagtttgtgctgttcattctcgaagaaaaaatgggtgcgacgcgtcgtacttttctgacagatttagcccgcaagaaagggttccgcgtcgagaatgaactgaccgacgaagttacccacatcgtggcagaaaatctgtcacgctctgaagtattggcttggctgaaagaacacaagatggagaagaccaagcaattcgaactgctggatattagctggcttatcgaaagcatgaaagttggtaaaccggtggacaccaaggggaaataccagttggcggaatcggttgaggtgagtgcgaacccagatccgacagaaggtcgtgtaaacgagctgcctcctactatgaaaaccgtttctccgtatgcgtgtcaacgccgcaccaccctgaacaaccgtaatcaacgttttacggactcgctggagattcttcgtgaaaattacgagctgaaaggcaacgacgatactgcgctggaatttcgtcgtgctatctccgtgctgaaaagccttccgtttgaggtacgtagcctgaaagacacggaaggattgccctggatcagtgatgaagtcaaagggattatggaagaaatcatcgaagtcggggagtcgcgtgaagtgcaggccgtgctcaatgatgagtggtatcaaagcttccacgcatttacgcgtgtctttggagtgggggtgaagacagcagacaagtggtaccgtatgggtctgcgcaccctcgaggatgttcgttccagcaagaccctgaagttgaccccgtggcagaaagtaggtctgctgtattatgaagatcttgctcgcggcgttacgcgtgccgaagctgacgcgatttggctgctggttcaggatgcagtcgcaactttcgacccggatgcgatcgtggagattgtcggtggatggcgtcgtgggaaacctcagggtcacgacgttgatctgcttatcagttctccgggagctgaaaaagagcaagaagaccaactcctgcagaaagtgatgaatctgtggaagaaacaagggttgttgctgtgtggtcgtctggaatggagtcagtgggaatgggggggttcgccttccggtaaggctgatgagggtgacgcggaggcgtcgtgctttctgatcctcaaactttatgatcatctggtgcgtaaaagtaaacgcaatatgccgactggttcgaacatgggcgagtccaaaccgtggaaagcaattaaagtagatctgctgcgttgcccccgcggcagttttgcgtttgcgatgttgcagtggaccggaagccgcatgttccgtcgtgatctgcgctggtacgccctggaagagaagaacatgatgctggacaatcattcgctgtatgacatgactcgtggtatccaactccctgctaaatcggaagaggaaattttcgaacatctggggcttgaatacctggaaccgttcgaacgtaacgca

SEQ ID NO: 4506 - protein, 528 aa, synthetic construct
  REGION 1..528: note = Variant of terminal deoxynucleotidyltransferase
MHHHHHGGSGSHGIRTIDSDFGKKQQKKGDNHDSSATYEIKFHEFVLFILEEKMGATRRTFLTDLARKKGFRVENELTDEVTHIVAENLSRSEVLAWLKEHKMEKTKQFELLDISWLIESMKVGKPVDTKGKYQLAESVEVSANPDPTEGRVNELPPTMKTVSPYACQRRTTLNNRNQRFTDSLEILRENYELKGNDDTALEFRRAISVLKSLPFEVRSLKDTEGLPWISDEVKGIMEEIIEVGESREVQAVLNDEWYQSFHAFTRVFGVGVKTADKWYRMGLRTLEDVRSSKTLKLTPWQKVGLLYYEDLARGVTRAEADAIWLLVQDAVATFDPDAIVEIVGGWRRGKPQGHDVDLLISSPGAEKEQEDQLLQKVMNLWKKQGLLLCGRLEWSQWEWGGSPSGKADEGDAEASCFLILKLYDHLVRKSKRNMPTGSNMGESKPWKAIKVDLLRCPRGSFAFAMLQWTGSRMFRRDLRWYALEEKNMMLDNHSLYDMTRGIQLPAKSEEEIFEHLGLEYLEPFERNA

SEQ ID NO: 4507 - DNA, 1584 bp, synthetic construct
  misc_feature 1..1584: note = Variant of terminal deoxynucleotidyltransferase
  source 1..1584: mol_type = other DNA
atgcaccatcatcatcatggcggtagcggcagccacggcattcgtaccatcgattcggacttcgggaagaaacagcagaaaaaaggcgataaccacgatagttccgccacttatgaaatcaaatttcacgagtttgtgctgttcattctcgaagaaaaaatgggtgcgacgcgtcgtacttttctgacagatttagcccgcaagaaagggttccgcgtcgagaatgaactgaccgacgaagttacccacatcgtggcagaaaatctgtcacgctctgaagtattggcttggctgaaagaacacaagatggagaagaccaagcaattcgaactgctggatattagctggcttatcgaaagcatgaaagttggtaaaccggtggacaccaaggggaaataccagttggcggaatcggttgaggtgagtgcgaacccagatccgacagaaggtcgtgtaaacgagctgcctcctactatgaaaaccgtttctccgtatgcgtgtcaacgccgcaccaccctgaacaaccgtaatcaacgttttacggactcgctggagattcttcgtgaaaattacgagctgaaaggcaacgacgatactgcgctggaatttcgtcgtgctatctccgtgctgaaaagccttccgtttgaggtacgtagcctgaaagacacggaaggattgccctggatcagtgatgaagtcaaagggattatggaagaaatcatcgaagtcggggagtcgcgtgaagtgcaggccgtgctcaatgatgagtggtatcaaagcttccacgcatttacgcgtgtctttggagtgggggtgaagacagcagacaagtggtaccgtatgggtctgcgcaccctcgaggatgttcgttccagcaagaccctgaagttgaccccgtggcagaaagtaggtctgctgtattatgaagatcttgctcgcggcgttacgcgtgccgaagctgacgcgatttggctgctggttcaggatgcagtcgcaactttcgacccggatgcgatcgtggagattgtcggtggatttcgtcgtgggaaacctcagggtcacgacgttgatctgcttatcagttctccgggagctgaaaaagagcaagaagaccaactcctgcagaaagtgatgaatctgtggaagaaacaagggttgttgctgtgtggtcgtctggaatggagtcagtgggaatgggggggttcgccttccggtaagagtgatgagggtgacgcggaggcgtcgtgctttctgatcctcaaactttatgatcatctggtgcgtaaaagtaaacgcaatatgccgactggttcgaacatgggcgagtccaaaccgtggaaagcaattaaagtagatctgctgcgttgcccccgcggcagttttgcgtttgcgatgttgcagtggaccggaagccgcatgttccgtcgtgatctgcgctggtacgccctggaagagaagaacatgatgctggacaatcattcgctgtatgacatgactcgtggtatccaactccctgctaaatcggaagaggaaattttcgaacatctggggcttgaatacctggaaccgttcgaacgtaacgca

SEQ ID NO: 4508 - protein, 528 aa, synthetic construct
  REGION 1..528: note = Variant of terminal deoxynucleotidyltransferase
MHHHHHGGSGSHGIRTIDSDFGKKQQKKGDNHDSSATYEIKFHEFVLFILEEKMGATRRTFLTDLARKKGFRVENELTDEVTHIVAENLSRSEVLAWLKEHKMEKTKQFELLDISWLIESMKVGKPVDTKGKYQLAESVEVSANPDPTEGRVNELPPTMKTVSPYACQRRTTLNNRNQRFTDSLEILRENYELKGNDDTALEFRRAISVLKSLPFEVRSLKDTEGLPWISDEVKGIMEEIIEVGESREVQAVLNDEWYQSFHAFTRVFGVGVKTADKWYRMGLRTLEDVRSSKTLKLTPWQKVGLLYYEDLARGVTRAEADAIWLLVQDAVATFDPDAIVEIVGGFRRGKPQGHDVDLLISSPGAEKEQEDQLLQKVMNLWKKQGLLLCGRLEWSQWEWGGSPSGKSDEGDAEASCFLILKLYDHLVRKSKRNMPTGSNMGESKPWKAIKVDLLRCPRGSFAFAMLQWTGSRMFRRDLRWYALEEKNMMLDNHSLYDMTRGIQLPAKSEEEIFEHLGLEYLEPFERNA

SEQ ID NO: 4509 - DNA, 1584 bp, synthetic construct
  misc_feature 1..1584: note = Variant of terminal deoxynucleotidyltransferase
  source 1..1584: mol_type = other DNA
atgcaccatcatcatcatggcggtagcggcagccacggcattcgtaccatcgattcggacttcgggaagaaacagcagaaaaaaggcgataaccacgatagttccgccacttatgaaatcaaatttcacgagtttgtgctgttcattctcgaagaaaaaatgggtgcgacgcgtcgtacttttctgacagatttagcccgcaagaaagggttccgcgtcgagaatgaactgaccgacgaagttacccacatcgtggcagaaaatctgtcacgctctgaagtattggcttggctgaaagaacacaagatggagaagaccaagcaattcgaactgctggatattagctggcttatcgaaagcatgaaagttggtaaaccggtggacaccaaggggaaataccagttggcggaatcggttgaggtgagtgcgaacccagatccgacagaaggtcgtgtaaacgagctgcctcctactatgaaaaccgtttctccgtatgcgtgtcaacgccgcaccaccctgaacaaccgtaatcaacgttttacggactcgctggagattcttaaggaaaattacgagctgaaaggcaacgacgatactgcgctggaatttcgtcgtgctatctccgtgctgaaaagccttccgtttgaggtacgtagcctgaaagacacggaaggattgccctggatcagtgatgaagtcaaagggattatggaagaaatcatcgaagtcggggagtcgcgtgaagtgcaggccgtgctcaatgatgagtggtatcaaagcttccacgcatttacgcgtgtctttggagtgggggtgaagacagcagacaagtggtaccgtatgggtctgcgcaccctcgaggatgttcgttccagcaagaccctgaagttgaccccgtggcagaaagtaggtctgctgtattatgaagatcttgctcgcggcgttacgcgtgccgaagctgacgcgatttggctgctggttcaggatgcagtcgcaactttcgacccggatgcgatcgtggagattgtcggtggatttcgtcgtgggaaacctcagggtcacgacgttgatctgcttatcagttctccgggagctgaaaaagagcaagaagaccaactcctgcagaaagtgatgaatctgtggaagaaacaagggttgttgctgtgtggtcgtctggaatggagtcagtgggaatgggggggttcgccttccggtaaggctgatgagggtgacgcggaggcgtcgtgctttctgatcctcaaactttatgatcatctggtgcgtaaaagtaaacgcaatatgccgactggttcgaacatgggcgagtccaaaccgtggaaagcaattaaagtagatctgctgcgttgcccccgcggcagttttgcgtttgcgatgttgcagtggaccggaagccgcatgttccgtcgtgatctgcgctggtacgccctggaagagaagaacatgatgctggacaatcattcgctgtatgacatgactcgtggtatccaactccctgctaaatcggaagaggaaattttcgaacatctggggcttgaatacctggaaccgttcgaacgtaacgca

SEQ ID NO: 4510 - protein, 528 aa, synthetic construct
  REGION 1..528: note = Variant of terminal deoxynucleotidyltransferase
MHHHHHGGSGSHGIRTIDSDFGKKQQKKGDNHDSSATYEIKFHEFVLFILEEKMGATRRTFLTDLARKKGFRVENELTDEVTHIVAENLSRSEVLAWLKEHKMEKTKQFELLDISWLIESMKVGKPVDTKGKYQLAESVEVSANPDPTEGRVNELPPTMKTVSPYACQRRTTLNNRNQRFTDSLEILKENYELKGNDDTALEFRRAISVLKSLPFEVRSLKDTEGLPWISDEVKGIMEEIIEVGESREVQAVLNDEWYQSFHAFTRVFGVGVKTADKWYRMGLRTLEDVRSSKTLKLTPWQKVGLLYYEDLARGVTRAEADAIWLLVQDAVATFDPDAIVEIVGGFRRGKPQGHDVDLLISSPGAEKEQEDQLLQKVMNLWKKQGLLLCGRLEWSQWEWGGSPSGKADEGDAEASCFLILKLYDHLVRKSKRNMPTGSNMGESKPWKAIKVDLLRCPRGSFAFAMLQWTGSRMFRRDLRWYALEEKNMMLDNHSLYDMTRGIQLPAKSEEEIFEHLGLEYLEPFERNA

SEQ ID NO: 4511 - DNA, 1584 bp, synthetic construct
  misc_feature 1..1584: note = Variant of terminal deoxynucleotidyltransferase
  source 1..1584: mol_type = other DNA
atgcaccatcatcatcatggcggtagcggcagccacggcattcgtaccatcgattcggacttcgggaagaaacagcagaaaaaaggcgataaccacgatagttccgccacttatgaaatcaaatttcacgagtttgtgctgttcattctcgaagaaaaaatgggtgcgacgcgtcgtacttttctgacagatttagcccgcaagaaagggttccgcgtcgagaatgaactgaccgacgaagttacccacatcgtggcagaaaatctgtcacgctctgaagtattggcttggctgaaagaacacaagatggagaagaccaagcaattcgaactgctggatattagctggcttatcgaaagcatgaaagttggtaaaccggtggacaccaaggggaaataccagttggcggaatcggttgaggtgagtgcgaacccagatccgacagaaggtcgtgtaaacgagctgcctcctactatgaaaaccgtttctccgtatgcgtgtcaacgccgcaccaccctgaacaaccgtaatcaacgttttacggactcgctggagattcttcgtgaaaattactcgctgaaaggcaacgacgatactgcgctggaatttcgtcgtgctatctccgtgctgaaaagccttccgtttgaggtacgtagcctgaaagacacggaaggattgccctggatcagtgatgaagtcaaagggattatggaagaaatcatcgaagtcggggagtcgcgtgaagtgcaggccgtgctcaatgatgagtggtatcaaagcttccacgcatttacgcgtgtctttggagtgggggtgaagacagcagacaagtggtaccgtatgggtctgcgcaccctcgaggatgttcgttccagcaagaccctgaagttgaccccgtggcagaaagtaggtctgctgtattatgaagatcttgctcgcggcgttacgcgtgccgaagctgacgcgatttggctgctggttcaggatgcagtcgcaactttcgacccggatgcgatcgtggagattgtcggtggatttcgtcgtgggaaacctcagggtcacgacgttgatctgcttatcagttctccgggagctgaaaaagagcaagaagaccaactcctgcagaaagtgatgaatctgtggaagaaacaagggttgttgctgtgtggtcgtctggaatggagtcagtgggaatgggggggttcgccttccggtaaggctgatgagggtgacgcggaggcgtcgtgctttctgatcctcaaactttatgatcatctggtgcgtaaaagtaaacgcaatatgccgactggttcgaacatgggcgagtccaaaccgtggaaagcaattaaagtagatctgctgcgttgcccccgcggcagttttgcgtttgcgatgttgcagtggaccggaagccgcatgttccgtcgtgatctgcgctggtacgccctggaagagaagaacatgatgctggacaatcattcgctgtatgaccctagtcgtggtatcggtctccctgctaaatcggaagaggaaattttcgaacatctggggcttgaatacctggaaccgttcgaacgtaacgca

SEQ ID NO: 4512 - protein, 528 aa, synthetic construct
  REGION 1..528: note = Variant of terminal deoxynucleotidyltransferase
MHHHHHGGSGSHGIRTIDSDFGKKQQKKGDNHDSSATYEIKFHEFVLFILEEKMGATRRTFLTDLARKKGFRVENELTDEVTHIVAENLSRSEVLAWLKEHKMEKTKQFELLDISWLIESMKVGKPVDTKGKYQLAESVEVSANPDPTEGRVNELPPTMKTVSPYACQRRTTLNNRNQRFTDSLEILRENYSLKGNDDTALEFRRAISVLKSLPFEVRSLKDTEGLPWISDEVKGIMEEIIEVGESREVQAVLNDEWYQSFHAFTRVFGVGVKTADKWYRMGLRTLEDVRSSKTLKLTPWQKVGLLYYEDLARGVTRAEADAIWLLVQDAVATFDPDAIVEIVGGFRRGKPQGHDVDLLISSPGAEKEQEDQLLQKVMNLWKKQGLLLCGRLEWSQWEWGGSPSGKADEGDAEASCFLILKLYDHLVRKSKRNMPTGSNMGESKPWKAIKVDLLRCPRGSFAFAMLQWTGSRMFRRDLRWYALEEKNMMLDNHSLYDPSRGIGLPAKSEEEIFEHLGLEYLEPFERNA

SEQ ID NO: 4513 - DNA, 1584 bp, synthetic construct
  misc_feature 1..1584: note = Variant of terminal deoxynucleotidyltransferase
  source 1..1584: mol_type = other DNA
atgcaccatcatcatcatggcggtagcggcagccacggcattcgtaccatcgattcggacttcgggaagaaacagcagaaaaaaggcgataaccacgatagttccgccacttatgaaatcaaatttcacgagtttgtgctgttcattctcgaagaaaaaatgggtgcgacgcgtcgtacttttctgacagatttagcccgcaagaaagggttccgcgtcgagaatgaactgaccgacgaagttacccacatcgtggcagaaaatctgtcacgctctgaagtattggcttggctgaaagaacacaagatggagaagaccaagcaattcgaactgctggatattagctggcttatcgaaagcatgaaagttggtaaaccggtggacaccaaggggaaataccagttggcggaatcggttgaggtgagtgcgaacccagatccgacagaaggtcgtgtaaacgagctgcctcctactatgaaaaccgtttctccgtatgcgtgtcaacgccgcaccaccctgaacaaccgtaatcaacgttttacggactcgctggagattcttcgtgaaaattacgagctgaaaggcaacgacgatactgcgctggaatttcgtcgtgctatctccgtgctgaaaagccttccgtttgaggtacgtagcctgaaagacacggaaggattgccctggatcagtgatgaagtcaaagggattatggaagaaatcatcgaagtcggggagtcgcgtgaagtgcaggccgtgctcaatgatgagtggtatcaaagcttccacgcatttacgcgtgtctttggagtgggggtgaagacagcagacaagtggtaccgtatgggtctgcgcaccctcgaggatgttcgttccagcaagaccctgaagttgaccccgtggcagaaagtaggtctgctgtattatgaagatcttgctcgcggcgttacgcgtgccgaagctgacgcgatttggctgctggttcaggatgcagtcgcaactttcgacccggatgcgatcgtggagattgtcggtggatttcgtcgtgggaaacctcagggtcacgacgttgatctgcttatcagttctccgggagctgaaaaagagcaagaagaccaactcctgcagaaagtgatgaatctgtggaagaaacaagggttgttgctgtgtggtcgtctggaatggagtcagtgggaatgggggggttcgccttccggtaaggctgatgagggtgacgcggaggcgtcgtgctttctgatcctcaaactttatgatcatctggtgcgtaaaagtaaacgcaatatgccgactggttcgaacatgggcgagtccaaaccgtggaaagcaattaaagtagatctgctgcgttgcccccgcggcagttttgcgtttgcgatgttgcagtggaccggaagccgcatgttccgtcgtgatctgcgctggtacgccctggaagagaagaacatgatgctgcggaatcattcgctgtatgacatgactcgtggtatccaactccctgctaaatcggaagaggaaattttcgaacatctggggcttgaatacctggaaccgttcgaacgtaacgca

SEQ ID NO: 4514 - protein, 528 aa, synthetic construct
  REGION 1..528: note = Variant of terminal deoxynucleotidyltransferase
MHHHHHGGSGSHGIRTIDSDFGKKQQKKGDNHDSSATYEIKFHEFVLFILEEKMGATRRTFLTDLARKKGFRVENELTDEVTHIVAENLSRSEVLAWLKEHKMEKTKQFELLDISWLIESMKVGKPVDTKGKYQLAESVEVSANPDPTEGRVNELPPTMKTVSPYACQRRTTLNNRNQRFTDSLEILRENYELKGNDDTALEFRRAISVLKSLPFEVRSLKDTEGLPWISDEVKGIMEEIIEVGESREVQAVLNDEWYQSFHAFTRVFGVGVKTADKWYRMGLRTLEDVRSSKTLKLTPWQKVGLLYYEDLARGVTRAEADAIWLLVQDAVATFDPDAIVEIVGGFRRGKPQGHDVDLLISSPGAEKEQEDQLLQKVMNLWKKQGLLLCGRLEWSQWEWGGSPSGKADEGDAEASCFLILKLYDHLVRKSKRNMPTGSNMGESKPWKAIKVDLLRCPRGSFAFAMLQWTGSRMFRRDLRWYALEEKNMMLRNHSLYDMTRGIQLPAKSEEEIFEHLGLEYLEPFERNA

SEQ ID NO: 4515 - DNA, 1584 bp, synthetic construct
  misc_feature 1..1584: note = Variant of terminal deoxynucleotidyltransferase
  source 1..1584: mol_type = other DNA
atgcaccatcatcatcatggcggtagcggcagccacggcattcgtaccatcgattcggacttcgggaagaaacagcagaaaaaaggcgataaccacgatagttccgccacttatgaaatcaaatttcacgagtttgtgctgttcattctcgaagaaaaaatgggtgcgacgcgtcgtacttttctgacagatttagcccgcaagaaagggttccgcgtcgagaatgaactgaccgacgaagttacccacatcgtggcagaaaatctgtcacgctctgaagtattggcttggctgaaagaacacaagatggagaagaccaagcaattcgaactgctggatattagctggcttatcgaaagcatgaaagttggtaaaccggtggacaccaaggggaaataccagttggcggaatcggttgaggtgagtgcgaacccagatccgacagaaggtcgtgtaaacgagctgcctcctactatgaaaaccgtttctccgtatgcgtgtcaacgccgcaccaccctgaacaaccgtaatcaacgttttacggactcgctggagattcttcgtgaaaattacgagctgaaaggcaacgacgatactgcgctggaatttcgtcgtgctatctccgtgctgaaaagccttccgtttgaggtacgtagcctgaaagacacggaaggattgccctggatcagtgatgaagtcaaagggattatggaagaaatcatcgaagtcggggagtcgcgtgaagtgcaggccgtgctcaatgatgagtggtatcaaagcttccacgcatttacgcgtgtctttggagtgggggtgaagacagcagacaagtggtaccgtatgggtctgcgcaccctcgaggatgttcgttccagcaagaccctgaagttgaccccgtggcagaaagtaggtctgctgtattatgaagatcttgctcgcggcgttacgcgtgccgaagctgacgcgatttggctgctggttcaggatgcagtcgcaactttcgacccggatgcgatcgtggagattgtcggtggatttcgtcgtgggaaacctcagggtcacgacgttgatctgcttatcagttctccgggagctgaaaaagagcaagaagaccaactcctgcagaaagtgatgaatctgtggaagaaacaagggttgttgctgtgtggtcgtctggaatggagtcagtgggaatgggggggttcgccttccggtaaggctgatgagcaggacgcggaggcgtcgtgctttctgatcctcaaactttatgatcatctggtgcgtaaaagtaaacgcaatatgccgactggttcgaacatgggcgagtccaaaccgtggaaagcaattaaagtagatctgctgcgttgcccccgcggcagttttgcgtttgcgatgttgcagtggaccggaagccgcatgttccgtcgtgatctgcgctggtacgccctggaagagaagaacatgatgctggacaatcattcgctgtatgacatgactcgtggtatccaactccctgctaaatcggaagaggaaattttcgaacatctggggcttgaatacctggaaccgttcgaacgtaacgca

SEQ ID NO: 4516 - protein, 528 aa, synthetic construct
  REGION 1..528: note = Variant of terminal deoxynucleotidyltransferase
MHHHHHGGSGSHGIRTIDSDFGKKQQKKGDNHDSSATYEIKFHEFVLFILEEKMGATRRTFLTDLARKKGFRVENELTDEVTHIVAENLSRSEVLAWLKEHKMEKTKQFELLDISWLIESMKVGKPVDTKGKYQLAESVEVSANPDPTEGRVNELPPTMKTVSPYACQRRTTLNNRNQRFTDSLEILRENYELKGNDDTALEFRRAISVLKSLPFEVRSLKDTEGLPWISDEVKGIMEEIIEVGESREVQAVLNDEWYQSFHAFTRVFGVGVKTADKWYRMGLRTLEDVRSSKTLKLTPWQKVGLLYYEDLARGVTRAEADAIWLLVQDAVATFDPDAIVEIVGGFRRGKPQGHDVDLLISSPGAEKEQEDQLLQKVMNLWKKQGLLLCGRLEWSQWEWGGSPSGKADEQDAEASCFLILKLYDHLVRKSKRNMPTGSNMGESKPWKAIKVDLLRCPRGSFAFAMLQWTGSRMFRRDLRWYALEEKNMMLDNHSLYDMTRGIQLPAKSEEEIFEHLGLEYLEPFERNA

SEQ ID NO: 4517 - DNA, 1584 bp, synthetic construct
  misc_feature 1..1584: note = Variant of terminal deoxynucleotidyltransferase
  source 1..1584: mol_type = other DNA
atgcaccatcatcatcatggcggtagcggcagccacggcattcgtaccatcgattcggacttcgggaagaaacagcagaaaaaaggcgataaccacgatagttccgccacttatgaaatcaaatttcacgagtttgtgctgttcattctcgaagaaaaaatgggtgcgacgcgtcgtacttttctgacagatttagcccgcaagaaagggttccgcgtcgagaatgaactgaccgacgaagttacccacatcgtggcagaaaatctgtcacgctctgaagtattggcttggctgaaagaacacaagatggagaagaccaagcaattcgaactgctggatattagctggcttatcgaaagcatgaaagttggtaaaccggtggacaccaaggggaaataccagttggcggaatcggttgaggtgagtgcgaacccagatccgacagaaggtcgtgtaaacgagctgcctcctactatgaaaaccgtttctccgtatgcgtgtcaacgccgcaccaccctgaacaaccgtaatcaacgttttacggactcgctggagattcttcgtgaaaattacgagctgaaaggcaacgacgatactgcgctggaatttcgtcgtgctatctccgtgctgaaaagccttccgtttgaggtacgtagcctgaaagacacggaaggattgccctggatcagtgatgaagtcaaagggattatggaagaaatcatcgaagtcggggagtcgcgtgaagtgcaggccgtgctcaatgatgagtggtatcaaagcttccacgcatttacgcgtgtctttggagtgggggtgaagacagcagacaagtggtaccgtatgggtctgcgcaccctcgaggatgttcgttccagcaagaccctgaagttgaccccgtggcagaaagtaggtctgctgtattatgaagatcttgctcgcggcgttacgcgtgccgaagctgacgcgatttggctgctggttcaggatgcagtcgcaactttcgacccggatgcgatcgtggagattgtcggtggatttcgtcgtgggaaacctcagggtcacgacgttgatggtcttatcagttctccgggagctgaaaaagagcaagaagaccaactcctgcagaaagtgatgaatctgtggaagaaacaagggttgttgctgtgtggtcgtctggaatggagtcagtgggaatgggggggttcgccttccggtaaggctgatgagggtgacgcggaggcgtcgtgctttctgatcctcaaactttatgatcatctggtgcgtaaaagtaaacgcaatatgccgactggttcgaacatgggcgagtccaaaccgtggaaagcaattaaagtagatctgctgcgttgcccccgcggcagttttgcgtttgcgatgttgcagtggaccggaagccgcatgttccgtcgtgatctgcgctggtacgccctggaagagaagaacatgatgctggacaatcattcgctgtatgacatgactcgtggtatccaactccctgctaaatcggaagaggaaattttcgaacatctggggcttgaatacctggaaccgttcgaacgtaacgca

SEQ ID NO: 4518 - protein, 528 aa, synthetic construct
  REGION 1..528: note = Variant of terminal deoxynucleotidyltransferase
MHHHHHGGSGSHGIRTIDSDFGKKQQKKGDNHDSSATYEIKFHEFVLFILEEKMGATRRTFLTDLARKKGFRVENELTDEVTHIVAENLSRSEVLAWLKEHKMEKTKQFELLDISWLIESMKVGKPVDTKGKYQLAESVEVSANPDPTEGRVNELPPTMKTVSPYACQRRTTLNNRNQRFTDSLEILRENYELKGNDDTALEFRRAISVLKSLPFEVRSLKDTEGLPWISDEVKGIMEEIIEVGESREVQAVLNDEWYQSFHAFTRVFGVGVKTADKWYRMGLRTLEDVRSSKTLKLTPWQKVGLLYYEDLARGVTRAEADAIWLLVQDAVATFDPDAIVEIVGGFRRGKPQGHDVDGLISSPGAEKEQEDQLLQKVMNLWKKQGLLLCGRLEWSQWEWGGSPSGKADEGDAEASCFLILKLYDHLVRKSKRNMPTGSNMGESKPWKAIKVDLLRCPRGSFAFAMLQWTGSRMFRRDLRWYALEEKNMMLDNHSLYDMTRGIQLPAKSEEEIFEHLGLEYLEPFERNA

SEQ ID NO: 4519 - DNA, 1584 bp, synthetic construct
  misc_feature 1..1584: note = Variant of terminal deoxynucleotidyltransferase
  source 1..1584: mol_type = other DNA
atgcaccatcatcatcatggcggtagcggcagccacggcattcgtaccatcgattcggacttcgggaagaaacagcagaaaaaaggcgataaccacgatagttccgccacttatgaaatcaaatttcacgagtttgtgctgttcattctcgaagaaaaaatgggtgcgacgcgtcgtacttttctgacagatttagcccgcaagaaagggttccgcgtcgagaatgaactgaccgacgaagttacccacatcgtggcagaaaatctgtcacgctctgaagtattggcttggctgaaagaacacaagatggagaagaccaagcaattcgaactgctggatattagctggcttatcgaaagcatgaaagttggtaaaccggtggacaccaaggggaaataccagttggcggaatcggttgaggtgagtgcgaacccagatccgacagaaggtcgtgtaaacgagctgcctcctactatgaaaaccgtttctccgtatgcgtgtcaacgccgcaccaccctgaacaaccgtaatcaacgttttacggactcgctggagattcttcgtgaaaattacgagctgaaaggcaacgacgatactgcgctggaatttcgtcgtgctatctccgtgctgaaaagccttccgtttgaggtacgtagcctgaaagacacggaaggattgccctggatcagtgatgaagtcaaagggattatggaagaaatcatcgaagtcggggagtcgcgtgaagtgcaggccgtgctcaatgatgagtggtatcaaagcttccacgcatttacgcgtgtctttggagtgggggtgaagacagcagacaagtggtaccgtatgggtctgcgcaccctcgaggatgttcgttccagcaagaccctgaagttgaccccgtggcagaaagtaggtctgctgtataaggaagatcttgctcgcggcgttacgcgtgccgaagctgacgcgatttggctgctggttcaggatgcagtcgcaactttcgacccggatgcgatcgtggagattgtcggtggatttcgtcgtgggaaacctcagggtcacgacgttgatctgcttatcagttctccgggagctgaaaaagagcaagaagaccaactcctgcagaaagtgatgaatctgtggaagaaacaagggttgttgctgtgtggtcgtctggaatggagtcagtgggaatgggggggttcgccttccggtaaggctgatgagggtgacgcggaggcgtcgtgctttctgatcctcaaactttatgatcatctggtgcgtaaaagtaaacgcaatatgccgactggttcgaacatgggcgagtccaaaccgtggaaagcaattaaagtagatctgctgcgttgcccccgcggcagttttgcgtttgcgatgttgcagtggaccggaagccgcatgttccgtcgtgatctgcgctggtacgccctggaagagaagaacatgatgctggacaatcattcgctgtatgacatgactcgtggtatccaactccctgctaaatcggaagaggaaattttcgaacatctggggcttgaatacctggaaccgttcgaacgtaacgca

SEQ ID NO: 4520 - protein, 528 aa, synthetic construct
  REGION 1..528: note = Variant of terminal deoxynucleotidyltransferase
MHHHHHGGSGSHGIRTIDSDFGKKQQKKGDNHDSSATYEIKFHEFVLFILEEKMGATRRTFLTDLARKKGFRVENELTDEVTHIVAENLSRSEVLAWLKEHKMEKTKQFELLDISWLIESMKVGKPVDTKGKYQLAESVEVSANPDPTEGRVNELPPTMKTVSPYACQRRTTLNNRNQRFTDSLEILRENYELKGNDDTALEFRRAISVLKSLPFEVRSLKDTEGLPWISDEVKGIMEEIIEVGESREVQAVLNDEWYQSFHAFTRVFGVGVKTADKWYRMGLRTLEDVRSSKTLKLTPWQKVGLLYKEDLARGVTRAEADAIWLLVQDAVATFDPDAIVEIVGGFRRGKPQGHDVDLLISSPGAEKEQEDQLLQKVMNLWKKQGLLLCGRLEWSQWEWGGSPSGKADEGDAEASCFLILKLYDHLVRKSKRNMPTGSNMGESKPWKAIKVDLLRCPRGSFAFAMLQWTGSRMFRRDLRWYALEEKNMMLDNHSLYDMTRGIQLPAKSEEEIFEHLGLEYLEPFERNA

SEQ ID NO: 4521 - DNA, 1584 bp, synthetic construct
  misc_feature 1..1584: note = Variant of terminal deoxynucleotidyltransferase
  source 1..1584: mol_type = other DNA
atgcaccatcatcatcatggcggtagcggcagccacggcattcgtaccatcgattcggacttcgggaagaaacagcagaaaaaaggcgataaccacgatagttccgccacttatgaaatcaaatttcacgagtttgtgctgttcattctcgaagaaaaaatgggtgcgacgcgtcgtacttttctgacagatttagcccgcaagaaagggttccgcgtcgagaatgaactgaccgacgaagttacccacatcgtggcagaaaatctgtcacgctctgaagtattggcttggctgaaagaacacaagatggagaagaccaagcaattcgaactgctggatattagctggcttatcgaaagcatgaaagttggtaaaccggtggacaccaaggggaaataccagttggcggaatcggttgaggtgagtgcgaacccagatccgacagaaggtcgtgtaaacgagctgcctcctactatgaaaaccgtttctccgtatgcgtgtcaacgccgcaccaccctgaacaaccgtaatcaacgttttacggactcgctggagattcttcgtgaaaattacgagctgaaaggcaacgacgatactgcgctggaatttcgtcgtgctatctccgtgctgaaaagccttccgtttgaggtacgtagcctgaaagacacggaaggattgccctggatcagtgatgaagtcaaagggattatggaagaaatcatcgaagtcggggagtcgcgtgaagtgcaggccgtgctcaatgatgagtggtatcaaagcttccacgcatttacgcgtgtctttggagtgggggtgaagacagcagacaagtggtaccgtatgggtctgcgcaccctcgaggatgttcgttccagcaagaccctgaagttgaccccgtggcagaaagtaggtctgctgtattatgaagatcttgctcgcggcgttacgcgtgccgaagctgacgcgatttggctgctggttcaggatgcagtcgcaactttcgacccggatgcgatcgtggagattgtcggtggatttcgtcgtgggaaacctcagggtcacgacgttgatctgcttatcagttctccgggagctgaaaaagagcaagaagaccaactcctgcagaaagtgatgaatctgtggaagaaacaagggttgttgctgtgtggtcgtctggaatggagtcagtgggaatgggggggttcgccttccggtaaggctgatgaggcggacgcggaggcgtcgtgctttctgatcctcaaactttatgatcatctggtgcgtaaaagtaaacgcaatatgccgactggttcgaacatgggcgagtccaaaccgtggaaagcaattaaagtagatctgctgcgttgcccccgcggcagttttgcgtttgcgatgttgcagtggaccggaagccgcatgttccgtcgtgatctgcgctggtacgccctggaagagaagaacatgatgctggacaatcattcgctgtatgacatgactcgtggtatccaactccctgctaaatcggaagaggaaattttcgaacatctggggcttgaatacctggaaccgttcgaacgtaacgca

SEQ ID NO: 4522 - protein, 528 aa, synthetic construct
  REGION 1..528: note = Variant of terminal deoxynucleotidyltransferase
MHHHHHGGSGSHGIRTIDSDFGKKQQKKGDNHDSSATYEIKFHEFVLFILEEKMGATRRTFLTDLARKKGFRVENELTDEVTHIVAENLSRSEVLAWLKEHKMEKTKQFELLDISWLIESMKVGKPVDTKGKYQLAESVEVSANPDPTEGRVNELPPTMKTVSPYACQRRTTLNNRNQRFTDSLEILRENYELKGNDDTALEFRRAISVLKSLPFEVRSLKDTEGLPWISDEVKGIMEEIIEVGESREVQAVLNDEWYQSFHAFTRVFGVGVKTADKWYRMGLRTLEDVRSSKTLKLTPWQKVGLLYYEDLARGVTRAEADAIWLLVQDAVATFDPDAIVEIVGGFRRGKPQGHDVDLLISSPGAEKEQEDQLLQKVMNLWKKQGLLLCGRLEWSQWEWGGSPSGKADEADAEASCFLILKLYDHLVRKSKRNMPTGSNMGESKPWKAIKVDLLRCPRGSFAFAMLQWTGSRMFRRDLRWYALEEKNMMLDNHSLYDMTRGIQLPAKSEEEIFEHLGLEYLEPFERNA

SEQ ID NO: 4523 - DNA, 1584 bp, synthetic construct
  misc_feature 1..1584: note = Variant of terminal deoxynucleotidyltransferase
  source 1..1584: mol_type = other DNA
atgcaccatcatcatcatggcggtagcggcagccacggcattcgtaccatcgattcggacttcgggaagaaacagcagaaaaaaggcgataaccacgatagttccgccacttatgaaatcaaatttcacgagtttgtgctgttcattctcgaagaaaaaatgggtgcgacgcgtcgtacttttctgacagatttagcccgcaagaaagggttccgcgtcgagaatgaactgaccgacgaagttacccacatcgtggcagaaaatctgtcacgctctgaagtattggcttggctgaaagaacacaagatggagaagaccaagcaattcgaactgctggatattagctggcttatcgaaagcatgaaagttggtaaaccggtggacaccaaggggaaataccagttggcggaatcggttgaggtgagtgcgaacccagatccgacagaaggtcgtgtaaacgagctgcctcctactatgaaaaccgtttctccgtatgcgtgtcaacgccgcaccaccctgaacaaccgtaatcaacgttttacggactcgctggagattcttcgtgaaaattacgagctgaaaggcaacgacgatactgcgctggaatttcgtcgtgctatctccgtgctgaaaagccttccgtttgaggtacgtagcctgaaagacacggaaggattgccctggatcagtgatgaagtcaaagggattatggaagaaatcatcgaagtcggggagtcgcgtgaagtgcaggccgtgctcaatgatgagtggtatcaaagcttccacgcatttacgcgtgtctttggagtgggggtgaagacagcagacaagtggtaccgtatgggtctgcgcaccctcgaggatgttcgttccagcaagaccctgaagttgaccccgtggcagaaagtaggtctgctgtatcatgaagatcttgctcgcggcgttacgcgtgccgaagctgacgcgatttggctgctggttcaggatgcagtcgcaactttcgacccggatgcgatcgtggagattgtcggtggatttcgtcgtgggaaacctcagggtcacgacgttgatctgcttatcagttctccgggagctgaaaaagagcaagaagaccaactcctgcagaaagtgatgaatctgtggaagaaacaagggttgttgctgtgtggtcgtctggaatggagtcagtgggaatgggggggttcgccttccggtaaggctgatgagggtgacgcggaggcgtcgtgctttctgatcctcaaactttatgatcatctggtgcgtaaaagtaaacgcaatatgccgactggttcgaacatgggcgagtccaaaccgtggaaagcaattaaagtagatctgctgcgttgcccccgcggcagttttgcgtttgcgatgttgcagtggaccggaagccgcatgttccgtcgtgatctgcgctggtacgccctggaagagaagaacatgatgctggacaatcattcgctgtatgacatgactcgtggtatcggactccctgctaaatcggaagaggaaattttcgaacatctggggcttgaatacctggaaccgttcgaacgtaacgca

SEQ ID NO: 4524 - protein, 528 aa, synthetic construct
  REGION 1..528: note = Variant of terminal deoxynucleotidyltransferase
MHHHHHGGSGSHGIRTIDSDFGKKQQKKGDNHDSSATYEIKFHEFVLFILEEKMGATRRTFLTDLARKKGFRVENELTDEVTHIVAENLSRSEVLAWLKEHKMEKTKQFELLDISWLIESMKVGKPVDTKGKYQLAESVEVSANPDPTEGRVNELPPTMKTVSPYACQRRTTLNNRNQRFTDSLEILRENYELKGNDDTALEFRRAISVLKSLPFEVRSLKDTEGLPWISDEVKGIMEEIIEVGESREVQAVLNDEWYQSFHAFTRVFGVGVKTADKWYRMGLRTLEDVRSSKTLKLTPWQKVGLLYHEDLARGVTRAEADAIWLLVQDAVATFDPDAIVEIVGGFRRGKPQGHDVDLLISSPGAEKEQEDQLLQKVMNLWKKQGLLLCGRLEWSQWEWGGSPSGKADEGDAEASCFLILKLYDHLVRKSKRNMPTGSNMGESKPWKAIKVDLLRCPRGSFAFAMLQWTGSRMFRRDLRWYALEEKNMMLDNHSLYDMTRGIGLPAKSEEEIFEHLGLEYLEPFERNA

SEQ ID NO: 4525 - DNA, 1584 bp, synthetic construct
  misc_feature 1..1584: note = Variant of terminal deoxynucleotidyltransferase
  source 1..1584: mol_type = other DNA
atgcaccatcatcatcatggcggtagcggcagccacggcattcgtaccatcgattcggacttcgggaagaaacagcagaaaaaaggcgataaccacgatagttccgccacttatgaaatcaaatttcacgagtttgtgctgttcattctcgaagaaaaaatgggtgcgacgcgtcgtacttttctgacagatttagcccgcaagaaagggttccgcgtcgagaatgaactgaccgacgaagttacccacatcgtggcagaaaatctgtcacgctctgaagtattggcttggctgaaagaacacaagatggagaagaccaagcaattcgaactgctggatattagctggcttatcgaaagcatgaaagttggtaaaccggtggacaccaaggggaaataccagttggcggaatcggttgaggtgagtgcgaacccagatccgacagaaggtcgtgtaaacgagctgcctcctactatgaaaaccgtttctccgtatgcgtgtcaacgccgcaccaccctgaacaaccgtaatcaacgttttacggactcgctggagattcttcgtgaaaattacgagctgaaaggcaacgacgatactgcgctggaatttcgtcgtgctatctccgtgctgaaaagccttccgtttgaggtacgtagcctgaaagacacggaaggattgccctggatcagtgatgaagtcaaagggattatggaagaaatcatcgaagtcggggagtcgcgtgaagtgcaggccgtgctcaatgatgagtggtatcaaagcttccacgcatttacgcgtgtctttggagtgggggtgaagacagcagacaagtggtaccgtatgggtctgcgcaccctcgaggatgttcgttccagcaagaccctgaagttgaccccgtggcagaaagtaggtctgctgtattatgaagatcttgctcgcggcgttacgcgtgccgaagctgacgcgatttggctgctggttcaggatgcagtcgcaactttcgacccggatgcgatcgtggagattgtcggtggatttcgtcgtgggaaacctcagggtcacgacgttgatctgcttatcagttctccgggagctgaaaaagagcaagaagaccaactcctgcagaaagtgatgaatctgtggaagaaacaagggttgttgctgtgtggtcgtctggaatggagtcagtgggaatgggggggttcgccttccggtaaggctgatgagggtgacgcggaggcgtcgtgctttggtatcctcaaactttatgatcatctggtgcgtaaaagtaaacgcaatatgccgactggttcgaacatgggcgagtccaaaccgtggaaagcaattaaagtagatctgctgcgttgcccccgcggcagttttgcgtttgcgatgttgcagtggaccggaagccgcatgttccgtcgtgatctgcgctggtacgccctggaagagaagaacatgatgctggacaatcattcgctgtatgaccctagtcgtggtatcggtctccctgctaaatcggaagaggaaattttcgaacatctggggcttgaatacctggaaccgttcgaacgtaacgca

SEQ ID NO: 4526 - protein, 528 aa, synthetic construct
  REGION 1..528: note = Variant of terminal deoxynucleotidyltransferase
MHHHHHGGSGSHGIRTIDSDFGKKQQKKGDNHDSSATYEIKFHEFVLFILEEKMGATRRTFLTDLARKKGFRVENELTDEVTHIVAENLSRSEVLAWLKEHKMEKTKQFELLDISWLIESMKVGKPVDTKGKYQLAESVEVSANPDPTEGRVNELPPTMKTVSPYACQRRTTLNNRNQRFTDSLEILRENYELKGNDDTALEFRRAISVLKSLPFEVRSLKDTEGLPWISDEVKGIMEEIIEVGESREVQAVLNDEWYQSFHAFTRVFGVGVKTADKWYRMGLRTLEDVRSSKTLKLTPWQKVGLLYYEDLARGVTRAEADAIWLLVQDAVATFDPDAIVEIVGGFRRGKPQGHDVDLLISSPGAEKEQEDQLLQKVMNLWKKQGLLLCGRLEWSQWEWGGSPSGKADEGDAEASCFGILKLYDHLVRKSKRNMPTGSNMGESKPWKAIKVDLLRCPRGSFAFAMLQWTGSRMFRRDLRWYALEEKNMMLDNHSLYDPSRGIGLPAKSEEEIFEHLGLEYLEPFERNA

SEQ ID NO: 4527 - DNA, 1584 bp, synthetic construct
  misc_feature 1..1584: note = Variant of terminal deoxynucleotidyltransferase
  source 1..1584: mol_type = other DNA
atgcaccatcatcatcatggcggtagcggcagccacggcattcgtaccatcgattcggacttcgggaagaaacagcagaaaaaaggcgataaccacgatagttccgccacttatgaaatcaaatttcacgagtttgtgctgttcattctcgaagaaaaaatgggtgcgacgcgtcgtacttttctgacagatttagcccgcaagaaagggttccgcgtcgagaatgaactgaccgacgaagttacccacatcgtggcagaaaatctgtcacgctctgaagtattggcttggctgaaagaacacaagatggagaagaccaagcaattcgaactgctggatattagctggcttatcgaaagcatgaaagttggtaaaccggtggacaccaaggggaaataccagttggcggaatcggttgaggtgagtgcgaacccagatccgacagaaggtcgtgtaaacgagctgcctcctactatgaaaaccgtttctccgtatgcgtgtcaacgccgcaccaccctgaacaaccgtaatcaacgttttacggactcgctggagattcttcgtgaaaattactatctgaaaggcaacgacgatactgcgctggaatttcgtcgtgctatctccgtgctgaaaagccttccgtttgaggtacgtagcctgaaagacacggaaggattgccctggatcagtgatgaagtcaaagggattatggaagaaatcatcgaagtcggggagtcgcgtgaagtgcaggccgtgctcaatgatgagtggtatcaaagcttccacgcatttacgcgtgtctttggagtgggggtgaagacagcagacaagtggtaccgtatgggtctgcgcaccctcgaggatgttcgttccagcaagaccctgaagttgaccccgtggcagaaagtaggtctgctgtattatgaagatcttgctcgcggcgttacgcgtgccgaagctgacgcgatttggctgctggttcaggatgcagtcgcaactttcgacccggatgcgatcgtggagattgtcggtggatttcgtcgtgggaaacctcagggtcacgacgttgatctgcttatcagttctccgggagctgaaaaagagcaagaagaccaactcctgcagaaagtgatgaatctgtggaagaaacaagggttgttgctgtgtggtcgtctggaatggagtcagtgggaatgggggggttcgccttccggtaaggctgatgagggtgacgcggaggcgtcgtgctttctgatcctcaaactttatgatcatctggtgcgtaaaagtaaacgcaatatgccgactggttcgaacatgggcgagtccaaaccgtggaaagcaattaaagtagatctgctgcgttgcccccgcggcagttttgcgtttgcgatgttgcagtggaccggaagccgcatgttccgtcgtgatctgcgctggtacgccctggaagagaagaacatgatgctggacaatcattcgctgtatgaccctagtcgtggtatcggtctccctgctaaatcggaagaggaaattttcgaacatctggggcttgaatacctggaaccgttcgaacgtaacgca

SEQ ID NO: 4528 - protein, 528 aa, synthetic construct
  REGION 1..528: note = Variant of terminal deoxynucleotidyltransferase
MHHHHHGGSGSHGIRTIDSDFGKKQQKKGDNHDSSATYEIKFHEFVLFILEEKMGATRRTFLTDLARKKGFRVENELTDEVTHIVAENLSRSEVLAWLKEHKMEKTKQFELLDISWLIESMKVGKPVDTKGKYQLAESVEVSANPDPTEGRVNELPPTMKTVSPYACQRRTTLNNRNQRFTDSLEILRENYYLKGNDDTALEFRRAISVLKSLPFEVRSLKDTEGLPWISDEVKGIMEEIIEVGESREVQAVLNDEWYQSFHAFTRVFGVGVKTADKWYRMGLRTLEDVRSSKTLKLTPWQKVGLLYYEDLARGVTRAEADAIWLLVQDAVATFDPDAIVEIVGGFRRGKPQGHDVDLLISSPGAEKEQEDQLLQKVMNLWKKQGLLLCGRLEWSQWEWGGSPSGKADEGDAEASCFLILKLYDHLVRKSKRNMPTGSNMGESKPWKAIKVDLLRCPRGSFAFAMLQWTGSRMFRRDLRWYALEEKNMMLDNHSLYDPSRGIGLPAKSEEEIFEHLGLEYLEPFERNA

SEQ ID NO: 4529 - DNA, 1584 bp, synthetic construct
  misc_feature 1..1584: note = Variant of terminal deoxynucleotidyltransferase
  source 1..1584: mol_type = other DNA
atgcaccatcatcatcatggcggtagcggcagccacggcattcgtaccatcgattcggacttcgggaagaaacagcagaaaaaaggcgataaccacgatagttccgccacttatgaaatcaaatttcacgagtttgtgctgttcattctcgaagaaaaaatgggtgcgacgcgtcgtacttttctgacagatttagcccgcaagaaagggttccgcgtcgagaatgaactgaccgacgaagttacccacatcgtggcagaaaatctgtcacgctctgaagtattggcttggctgaaagaacacaagatggagaagaccaagcaattcgaactgctggatattagctggcttatcgaaagcatgaaagttggtaaaccggtggacaccaaggggaaataccagttggcggaatcggttgaggtgagtgcgaacccagatccgacagaaggtcgtgtaaacgagctgcctcctactatgaaaaccgtttctccgtatgcgtgtcaacgccgcaccaccctgaacaaccgtaatcaacgttttacggactcgctggagattcttcgtgaaaattacgagctgaaaggcaacgacgatactgcgctggaatttcgtcgtgctatctccgtgctgaaaagccttccgtttgaggtacgtagcctgaaagacacggaaggattgccctggatcagtgatgaagtcaaagggattatggaagaaatcatcgaagtcggggagtcgcgtgaagtgcaggccgtgctcaatgatgagtggtatcaaagcttccacgcatttacgcgtgtctttggagtgggggtgaagacagcagacaagtggtaccgtatgggtctgcgcaccctcgaggatgttcgttccagcaagaccctgaagttgaccccgtggcagaaagtaggtctgctgtattatgaagatcttgctcgcggcgttacgcgtgccgaagctgacgcgatttggctgctggttcaggatgcagtcgcaactttcgacccggatgcgatcgtggagattgtcggtggatttcgtcgtgggaaacctcagggtcacgacgttgatctgcttatcagttctccgggagctgaaaaagagcaagaagaccaactcctgcagaaagtgatgaatctgtggaagaaacaagggttgttgctgtgtggtcgtctggaatggagtcagtgggaatgggggggttcgccttccggtaaggctgatgagggtgacgcggaggcgtcgtgctttctgatcctcaaactttatgatcatctggtgcgtaaaagtaaacgcaatatgccgactggttcgaacatgggcgagtccaaaccgtggaaagcaattaaagtagatctgctgcgttgcccccgcggcagttttgcgtttgcgatgttgcagtggaccggaagccgcatgttccgtcgtgatctgcgctggtacgccctggaagagaagaacatgatgctggggaatcattcgctgtatgacatgactcgtggtatccaactccctgctaaatcggaagaggaaattttcgaacatctggggcttgaatacctggaaccgttcgaacgtaacgca

SEQ ID NO: 4530 - protein, 528 aa, synthetic construct
  REGION 1..528: note = Variant of terminal deoxynucleotidyltransferase
MHHHHHGGSGSHGIRTIDSDFGKKQQKKGDNHDSSATYEIKFHEFVLFILEEKMGATRRTFLTDLARKKGFRVENELTDEVTHIVAENLSRSEVLAWLKEHKMEKTKQFELLDISWLIESMKVGKPVDTKGKYQLAESVEVSANPDPTEGRVNELPPTMKTVSPYACQRRTTLNNRNQRFTDSLEILRENYELKGNDDTALEFRRAISVLKSLPFEVRSLKDTEGLPWISDEVKGIMEEIIEVGESREVQAVLNDEWYQSFHAFTRVFGVGVKTADKWYRMGLRTLEDVRSSKTLKLTPWQKVGLLYYEDLARGVTRAEADAIWLLVQDAVATFDPDAIVEIVGGFRRGKPQGHDVDLLISSPGAEKEQEDQLLQKVMNLWKKQGLLLCGRLEWSQWEWGGSPSGKADEGDAEASCFLILKLYDHLVRKSKRNMPTGSNMGESKPWKAIKVDLLRCPRGSFAFAMLQWTGSRMFRRDLRWYALEEKNMMLGNHSLYDMTRGIQLPAKSEEEIFEHLGLEYLEPFERNA

SEQ ID NO: 4531 - DNA, 1584 bp, synthetic construct
  misc_feature 1..1584: note = Variant of terminal deoxynucleotidyltransferase
  source 1..1584: mol_type = other DNA
atgcaccatcatcatcatggcggtagcggcagccacggcattcgtaccatcgattcggacttcgggaagaaacagcagaaaaaaggcgataaccacgatagttccgccacttatgaaatcaaatttcacgagtttgtgctgttcattctcgaagaaaaaatgggtgcgacgcgtcgtacttttctgacagatttagcccgcaagaaagggttccgcgtcgagaatgaactgaccgacgaagttacccacatcgtggcagaaaatctgtcacgctctgaagtattggcttggctgaaagaacacaagatggagaagaccaagcaattcgaactgctggatattagctggcttatcgaaagcatgaaagttggtaaaccggtggacaccaaggggaaataccagttggcggaatcggttgaggtgagtgcgaacccagatccgacagaaggtcgtgtaaacgagctgcctcctactatgaaaaccgtttctccgtatgcgtgtcaacgccgcaccaccctgaacaaccgtaatcaacgttttacggactcgctggagattcttcgtgaaaattacgagctgaaaggcaacgacgatactgcgctggaatttcgtcgtgctatctccgtgctgaaaagccttccgtttgaggtacgtagcctgaaagacacggaaggattgccctggatcagtgatgaagtcaaagggattatggaagaaatcatcgaagtcggggagtcgcgtgaagtgcaggccgtgctcaatgatgagtggtatcaaagcttccacgcatttacgcgtgtctttggagtggggcctaagacagcagacaagtggtaccgtatgggtctgcgcaccctcgaggatgttcgttccagcaagaccctgaagttgaccccgtggcagaaagtaggtctgctgtattatgaagatcttgctcgcggcgttacgcgtgccgaagctgacgcgatttggctgctggttcaggatgcagtcgcaactttcgacccggatgcgatcgtggagattgtcggtggatttcgtcgtgggaaacctcagggtcacgacgttgatctgcttatcagttctccgggagctgaaaaagagcaagaagaccaactcctgcagaaagtgatgaatctgtggaagaaacaagggttgttgctgtgtggtcgtctggaatggagtcagtgggaatgggggggttcgccttccggtaaggctgatgagggtgacgcggaggcgtcgtgctttctgatcctcaaactttatgatcatctggtgcgtaaaagtaaacgcaatatgccgactggttcgaacatgggcgagtccaaaccgtggaaagcaattaaagtagatctgctgcgttgcccccgcggcagttttgcgtttgcgatgttgcagtggaccggaagccgcatgttccgtcgtgatctgcgctggtacgccctggaagagaagaacatgatgctggacaatcattcgctgtatgacatgactcgtggtatccaactccctgctaaatcggaagaggaaattttcgaacatctggggcttgaatacctggaaccgttcgaacgtaacgca

SEQ ID NO: 4532 - protein, 528 aa, synthetic construct
  REGION 1..528: note = Variant of terminal deoxynucleotidyltransferase
MHHHHHGGSGSHGIRTIDSDFGKKQQKKGDNHDSSATYEIKFHEFVLFILEEKMGATRRTFLTDLARKKGFRVENELTDEVTHIVAENLSRSEVLAWLKEHKMEKTKQFELLDISWLIESMKVGKPVDTKGKYQLAESVEVSANPDPTEGRVNELPPTMKTVSPYACQRRTTLNNRNQRFTDSLEILRENYELKGNDDTALEFRRAISVLKSLPFEVRSLKDTEGLPWISDEVKGIMEEIIEVGESREVQAVLNDEWYQSFHAFTRVFGVGPKTADKWYRMGLRTLEDVRSSKTLKLTPWQKVGLLYYEDLARGVTRAEADAIWLLVQDAVATFDPDAIVEIVGGFRRGKPQGHDVDLLISSPGAEKEQEDQLLQKVMNLWKKQGLLLCGRLEWSQWEWGGSPSGKADEGDAEASCFLILKLYDHLVRKSKRNMPTGSNMGESKPWKAIKVDLLRCPRGSFAFAMLQWTGSRMFRRDLRWYALEEKNMMLDNHSLYDMTRGIQLPAKSEEEIFEHLGLEYLEPFERNA

SEQ ID NO: 4533 - DNA, 1584 bp, synthetic construct
  misc_feature 1..1584: note = Variant of terminal deoxynucleotidyltransferase
  source 1..1584: mol_type = other DNA
atgcaccatcatcatcatggcggtagcggcagccacggcattcgtaccatcgattcggacttcgggaagaaacagcagaaaaaaggcgataaccacgatagttccgccacttatgaaatcaaatttcacgagtttgtgctgttcattctcgaagaaaaaatgggtgcgacgcgtcgtacttttctgacagatttagcccgcaagaaagggttccgcgtcgagaatgaactgaccgacgaagttacccacatcgtggcagaaaatctgtcacgctctgaagtattggcttggctgaaagaacacaagatggagaagaccaagcaattcgaactgctggatattagctggcttatcgaaagcatgaaagttggtaaaccggtggacaccaaggggaaataccagttggcggaatcggttgaggtgagtgcgaacccagatccgacagaaggtcgtgtaaacgagctgcctcctactatgaaaaccgtttctccgtatgcgtgtcaacgccgcaccaccctgaacaaccgtaatcaacgttttacggactcgctggagattcttcgtgaaaattacgagctgaaaggcaacgacgatactgcgctggaatttcgtcgtgctatctccgtgctgaaaagccttccgtttgaggtacgtagcctgaaagacacggaaggattgccctggatcagtgatgaagtcaaagggattatggaagaaatcatcgaagtcggggagtcgcgtgaagtgcaggccgtgctcaatgatgagtggtatcaaagcttccacgcatttacgcgtgtctttggagtgggggtgaagacagcagacaagtggtaccgtatgggtctgcgcaccctcgaggatgttcgttccagcaagaccctgaagttgaccccgtggcagaaagtaggtctgctgtattatgaagatcttgctcgcggcgttacgcgtgccgaagctgacgcgatttggctgctggttcaggatgcagtcgcaactttcgacccggatgcgatcgtggagattgtcggtggatttcgtcgtgggaaacctcagggtcacgacgttgatctgcttatcagttctccgggagctgaaaaagagcaagaagaccaactcctgcagaaagtgatgaatctgtggaagaaacaagggttgttgctgtgtggtcgtctggaatggagtcagtgggaatgggggggttcgccttccggtaaggctgatgagggtgacgcggaggcgtcgtgctttctggtgctcaaactttatgatcatctggtgcgtaaaagtaaacgcaatatgccgactggttcgaacatgggcgagtccaaaccgtggaaagcaattaaagtagatctgctgcgttgcccccgcggcagttttgcgtttgcgatgttgcagtggaccggaagccgcatgttccgtcgtgatctgcgctggtacgccctggaagagaagaacatgatgctggacaatcattcgctgtatgacatgactcgtggtatcggactccctgctaaatcggaagaggaaattttcgaacatctggggcttgaatacctggaaccgttcgaacgtaacgca

SEQ ID NO: 4534 - protein, 528 aa, synthetic construct
  REGION 1..528: note = Variant of terminal deoxynucleotidyltransferase
MHHHHHGGSGSHGIRTIDSDFGKKQQKKGDNHDSSATYEIKFHEFVLFILEEKMGATRRTFLTDLARKKGFRVENELTDEVTHIVAENLSRSEVLAWLKEHKMEKTKQFELLDISWLIESMKVGKPVDTKGKYQLAESVEVSANPDPTEGRVNELPPTMKTVSPYACQRRTTLNNRNQRFTDSLEILRENYELKGNDDTALEFRRAISVLKSLPFEVRSLKDTEGLPWISDEVKGIMEEIIEVGESREVQAVLNDEWYQSFHAFTRVFGVGVKTADKWYRMGLRTLEDVRSSKTLKLTPWQKVGLLYYEDLARGVTRAEADAIWLLVQDAVATFDPDAIVEIVGGFRRGKPQGHDVDLLISSPGAEKEQEDQLLQKVMNLWKKQGLLLCGRLEWSQWEWGGSPSGKADEGDAEASCFLVLKLYDHLVRKSKRNMPTGSNMGESKPWKAIKVDLLRCPRGSFAFAMLQWTGSRMFRRDLRWYALEEKNMMLDNHSLYDMTRGIGLPAKSEEEIFEHLGLEYLEPFERNA

SEQ ID NO: 4535 - DNA, 1584 bp, synthetic construct
  misc_feature 1..1584: note = Variant of terminal deoxynucleotidyltransferase
  source 1..1584: mol_type = other DNA
atgcaccatcatcatcatggcggtagcggcagccacggcattcgtaccatcgattcggacttcgggaagaaacagcagaaaaaaggcgataaccacgatagttccgccacttatgaaatcaaatttcacgagtttgtgctgttcattctcgaagaaaaaatgggtgcgacgcgtcgtacttttctgacagatttagcccgcaagaaagggttccgcgtcgagaatgaactgaccgacgaagttacccacatcgtggcagaaaatctgtcacgctctgaagtattggcttggctgaaagaacacaagatggagaagaccaagcaattcgaactgctggatattagctggcttatcgaaagcatgaaagttggtaaaccggtggacaccaaggggaaataccagttggcggaatcggttgaggtgagtgcgaacccagatccgacagaaggtcgtgtaaacgagctgcctcctactatgaaaaccgtttctccgtatgcgtgtcaacgccgcaccaccctgaacaaccgtaatcaacgttttacggactcgctggagattcttcgtgaaaattacgagctgaaaggcaacgacgatactgcgctgcgcttccgtcgtgctatctccgtgctgaaaagccttccgtttgaggtacgtagcctgaaagacacggaaggattgccctggatcagtgatgaagtcaaagggattatggaagaaatcatcgaagtcggggagtcgcgtgaagtgcaggccgtgctcaatgatgagtggtatcaaagcttccacgcatttacgcgtgtctttggagtgggggtgaagacagcagacaagtggtaccgtatgggtctgcgcaccctcgaggatgttcgttccagcaagaccctgaagttgaccccgtggcagaaagtaggtctgctgtattatgaagatcttgctcgcggcgttacgcgtgccgaagctgacgcgatttggctgctggttcaggatgcagtcgcaactttcgacccggatgcgatcgtggagattgtcggtggatttcgtcgtgggaaacctcagggtcacgacgttgatctgcttatcagttctccgggagctgaaaaagagcaagaagaccaactcctgcagaaagtgatgaatctgtggaagaaacaagggttgttgctgtgtggtcgtctggaatggagtcagtgggaatgggggggttcgccttccggtaaggctgatgagggtgacgcggaggcgtcgtgctttctgatcctcaaactttatgatcatctggtgcgtaaaagtaaacgcaatatgccgactggttcgaacatgggcgagtccaaaccgtggaaagcaattaaagtagatctgctgcgttgcccccgcggcagttttgcgtttgcgatgttgcagtggaccggaagccgcatgttccgtcgtgatctgcgctggtacgccctggaagagaagaacatgatgctggacaatcattcgctgtatgacatgactcgtggtatccaactccctgctaaatcggaagaggaaattttcgaacatctggggcttgaatacctggaaccgttcgaacgtaacgca

SEQ ID NO: 4536 - protein, 528 aa, synthetic construct
  REGION 1..528: note = Variant of terminal deoxynucleotidyltransferase
MHHHHHGGSGSHGIRTIDSDFGKKQQKKGDNHDSSATYEIKFHEFVLFILEEKMGATRRTFLTDLARKKGFRVENELTDEVTHIVAENLSRSEVLAWLKEHKMEKTKQFELLDISWLIESMKVGKPVDTKGKYQLAESVEVSANPDPTEGRVNELPPTMKTVSPYACQRRTTLNNRNQRFTDSLEILRENYELKGNDDTALRFRRAISVLKSLPFEVRSLKDTEGLPWISDEVKGIMEEIIEVGESREVQAVLNDEWYQSFHAFTRVFGVGVKTADKWYRMGLRTLEDVRSSKTLKLTPWQKVGLLYYEDLARGVTRAEADAIWLLVQDAVATFDPDAIVEIVGGFRRGKPQGHDVDLLISSPGAEKEQEDQLLQKVMNLWKKQGLLLCGRLEWSQWEWGGSPSGKADEGDAEASCFLILKLYDHLVRKSKRNMPTGSNMGESKPWKAIKVDLLRCPRGSFAFAMLQWTGSRMFRRDLRWYALEEKNMMLDNHSLYDMTRGIQLPAKSEEEIFEHLGLEYLEPFERNA

SEQ ID NO: 4537 - DNA, 1584 bp, synthetic construct
  misc_feature 1..1584: note = Variant of terminal deoxynucleotidyltransferase
  source 1..1584: mol_type = other DNA
atgcaccatcatcatcatggcggtagcggcagccacggcattcgtaccatcgattcggacttcgggaagaaacagcagaaaaaaggcgataaccacgatagttccgccacttatgaaatcaaatttcacgagtttgtgttgttcattctcgaagaaaaaatgggtgcgacgcgtcgtacttttctgacagatttagcccgcaagaaagggttccgcgtcgagaatgaactgaccgacgaagttacccacatcgtggcagaaaatctgtcacgctctgaagtattggcttggctgaaagaacacaagatggagaagaccaagcaattcgaactgctggatattagctggcttatcgaaagcatgaaagttggtaaaccggtggacaccaaggggaaataccagttggcggaatcggttgaggtgagtgcgaacccagatccgacagaaggtcgtgtaaacgagctgcctcctactatgaaaaccgtttctccgtatgcgtgtcaacgccgcaccaccctgaacaaccgtaatcaacgttttacggactcgctggagattcttcgtgaaaattacgagctgaaaggcaacgacgatactgcgctggaatttcgtcgtgctatctccgtgctgaaaagccttccgtttgaggtacgtagcctgaaagacacggaaggattgccctggatcagtgatgaagtcaaagggattatggaagaaatcatcgaagtcggggagtcgcgtgaagtgcaggccgtgctcaatgatgagtggtatcaaagcttccacgcatttacgcgtgtctttggagtgggggtgaagacagcagacaagtggtaccgtatgggtctgcgcaccctcgaggatgttcgttccagcaagaccctgaagttgaccccgtggcagaaagtaggtctgctgtattatgaagatcttgctcgcggcgttacgcgtgccgaagctgacgcgatttggctgctggttcaggatgcagtcgcaactttcgacccggatgcgatcgtggagattgtcggtggatttcgtcgtgggaaacctcagggtcacgacgttgatctgcttatcagttctccgggagctgaaaaagagcaagaagaccaactcctgcagaaagtgatgaatctgtggaagaaacaagggttgttgctgtgtggtcgtctggaatggagtcagtgggaatgggggggttcgccttccggtaaggctgatgagggtgacgcggaggcgtcgtgctttctgatcctcaaactttatgatcatctggtgcgcaaaagtaaacgcaatatgccgactggttcgaacatgggcgagtccaaaccgtggaaagcaattaaagtagatctgctgcgttgcccccgcggcagttttgcgtttgcgatgttgcagtggaccggaagccgcatgttccgtcgtgatctgcgctggtacgccctggaagagaagaacatgatgctggacaatcattcgctgtatgaccctagtcgtggtatcggtctccctgctaaatcggaagaggaaattttcgaacatctggggcttgaatacctggaaccgttcgaacgtaacgca

SEQ ID NO: 4538 - protein, 528 aa, synthetic construct
  REGION 1..528: note = Variant of terminal deoxynucleotidyltransferase
MHHHHHGGSGSHGIRTIDSDFGKKQQKKGDNHDSSATYEIKFHEFVLFILEEKMGATRRTFLTDLARKKGFRVENELTDEVTHIVAENLSRSEVLAWLKEHKMEKTKQFELLDISWLIESMKVGKPVDTKGKYQLAESVEVSANPDPTEGRVNELPPTMKTVSPYACQRRTTLNNRNQRFTDSLEILRENYELKGNDDTALEFRRAISVLKSLPFEVRSLKDTEGLPWISDEVKGIMEEIIEVGESREVQAVLNDEWYQSFHAFTRVFGVGVKTADKWYRMGLRTLEDVRSSKTLKLTPWQKVGLLYYEDLARGVTRAEADAIWLLVQDAVATFDPDAIVEIVGGFRRGKPQGHDVDLLISSPGAEKEQEDQLLQKVMNLWKKQGLLLCGRLEWSQWEWGGSPSGKADEGDAEASCFLILKLYDHLVRKSKRNMPTGSNMGESKPWKAIKVDLLRCPRGSFAFAMLQWTGSRMFRRDLRWYALEEKNMMLDNHSLYDPSRGIGLPAKSEEEIFEHLGLEYLEPFERNA

SEQ ID NO: 4539 - DNA, 1584 bp, synthetic construct
  misc_feature 1..1584: note = Variant of terminal deoxynucleotidyltransferase
  source 1..1584: mol_type = other DNA
atgcaccatcatcatcatggcggtagcggcagccacggcattcgtaccatcgattcggacttcgggaagaaacagcagaaaaaaggcgataaccacgatagttccgccacttatgaaatcaaatttcacgagtttgtgctgttcattctcgaagaaaaaatgggtgcgacgcgtcgtacttttctgacagatttagcccgcaagaaagggttccgcgtcgagaatgaactgaccgacgaagttacccacatcgtggcagaaaatctgtcacgctctgaagtattggcttggctgaaagaacacaagatggagaagaccaagcaattcgaactgctggatattagctggcttatcgaaagcatgaaagttggtaaaccggtggacaccaaggggaaataccagttggcggaatcggttgaggtgagtgcgaacccagatccgacagaaggtcgtgtaaacgagctgcctcctactatgaaaaccgttcagccgtatgcgtgtcaacgccgcaccaccctgaacaaccgtaatcaacgttttacggactcgctggagattcttcgtgaaaattacgagctgaaaggcaacgacgatactgcgctggagatccgtcgtgctatctccgtgctgaaaagccttccgtttgaggtacgtagcctgaaagacacggaaggattgccctggatcagtgatgaagtcaaagggattatggaagaaatcatcgaagtcggggagtcgcgtgaagtgcaggccgtgctcaatgatgagtggtatcaaagcttccacgcatttacgcgtgtctttggagtgggggtgaagacagcagacaagtggtaccgtatgggtctgcgcaccctcgaggatgttcgttccagcaagaccctgaagttgaccccgtggcagaaagtaggtctgctgtattatgaagatcttgctcgcggcgttacgcgtgccgaagctgacgcgatttggctgctggttcaggatgcagtcgcaactttcgacccggatgcgatcgtggagattgtcggtggatttcgtcgtgggaaacctcagggtcacgacgttgatctgcttatcagttcgcctggagctagtaaagagcaagaagaccaactcctgcagaaagtgatgaatctgtggaagaaacaagggttgttgctgtgtggtcgtctggaatggagtcagtgggaatgggggggttcgccttccggtaaggctgatgagggtgacgcggaggcgtcgtgctttctgatcctcaaactttatgatcatctggtgcgcaaaagtaaacgcaatatgccgactggttcgaacatgggcgagtccaaaccgtggaaagcaattaaagtagatctgctgcgttgcccccgcggcagttttgcgtttgcgatgttgcagtggaccggaagccgcatgttccgtcgtgatctgcgctggtacgccctggaagagaagaacatgatgctggacaatcattcgctgtatgacatgactcgtggtatccaactccctgctaaatcggaagaggaaattttcgaacatctggggcttgaatacctggaaccgttcgaacgtaacgca

SEQ ID NO: 4540 - protein, 528 aa, synthetic construct
  REGION 1..528: note = Variant of terminal deoxynucleotidyltransferase
MHHHHHGGSGSHGIRTIDSDFGKKQQKKGDNHDSSATYEIKFHEFVLFILEEKMGATRRTFLTDLARKKGFRVENELTDEVTHIVAENLSRSEVLAWLKEHKMEKTKQFELLDISWLIESMKVGKPVDTKGKYQLAESVEVSANPDPTEGRVNELPPTMKTVQPYACQRRTTLNNRNQRFTDSLEILRENYELKGNDDTALEIRRAISVLKSLPFEVRSLKDTEGLPWISDEVKGIMEEIIEVGESREVQAVLNDEWYQSFHAFTRVFGVGVKTADKWYRMGLRTLEDVRSSKTLKLTPWQKVGLLYYEDLARGVTRAEADAIWLLVQDAVATFDPDAIVEIVGGFRRGKPQGHDVDLLISSPGASKEQEDQLLQKVMNLWKKQGLLLCGRLEWSQWEWGGSPSGKADEGDAEASCFLILKLYDHLVRKSKRNMPTGSNMGESKPWKAIKVDLLRCPRGSFAFAMLQWTGSRMFRRDLRWYALEEKNMMLDNHSLYDMTRGIQLPAKSEEEIFEHLGLEYLEPFERNA

SEQ ID NO: 4541 - DNA, 1584 bp, synthetic construct
  misc_feature 1..1584: note = Variant of terminal deoxynucleotidyltransferase
  source 1..1584: mol_type = other DNA
atgcaccatcatcatcatggcggtagcggcagccacggcattcgtaccatcgattcggacttcgggaagaaacagcagaaaaaaggcgataaccacgatagttccgccacttatgaaatcaaatttcacgagtttgtgctgttcattctcgaagaaaaaatgggtgcgacgcgtcgtacttttctgacagatttagcccgcaagaaagggttccgcgtcgagaatgaactgaccgacgaagttacccacatcgtggcagaaaatctgtcacgctctgaagtattggcttggctgaaagaacacaagatggagaagaccaagcaattcgaactgctggatattagctggcttatcgaaagcatgaaagttggtaaaccggtggacaccaaggggaaataccagttggcggaatcggttgaggtgagtgcgaacccagatccgacagaaggtcgtgtaaacgagctgcctcctactatgaaaaccgttcagccgtatgcgtgtcaacgccgcaccaccctgaacaaccgtaatcaacgttttacggactcgctggagattcttcgtgaaaattacgagctgaaaggcaacgacgatactgcgctggaatttcgtcgtgctatctccgtgctgaaaagccttccgtttgaggtacgtagcctgaaagacacggaaggattgccctggatcagtgatgaagtcaaagggattatggaagaaatcatcgaagtcggggagtcgcgtgaagtgcaggccgtgctcaatgatgagtggtatcaaagcttccacgcatttacgcgtgtctttggagtgggggtgaagacagcagacaagtggtaccgtatgggtctgcgcaccctcgaggatgttcgttccagcaagaccctgaagttgaccccgtggcagaaagtaggtctgctgtattatgaagatcttgctcgcggcgttacgcgtgccgaagctgacgcgatttggctgctggttctggatgcagtcgcaactttcgacccggatgcgatcgtggagattgtcggtggatttcgtcgtgggaaacctcagggtcacgacgttgatctgcttatcagttcgggtggagctgaaaaagagcaagaagaccaactcctgcagaaagtgatgaatctgtggaagaaacaagggttgttgctgtgtggtcgtctggaatggagtcagtgggaatgggggggttcgccttccggtaaggctgatgagggtgacgcggaggcgtcgtgctttctgatcctcaaactttatgatcatctggtgcgcaaaagtaaacgcaatatgccgactggttcgaacatgggcgagtccaaaccgtggaaagcaattaaagtagatctgctgcgttgcccccgcggcagttttgcgtttgcgatgttgcagtggaccggaagccgcatgttccgtcgtgatctgcgcgattacgccctggaagagaagaacatgatgctggacaatcattcgctgtatgacatgactcgtggtatccaactccctgctaaatcggaagaggaaattttcgaacatctggggcttgaatacctggaaccgttcgaacgtaacgca

SEQ ID NO: 4542 - protein, 528 aa, synthetic construct
  REGION 1..528: note = Variant of terminal deoxynucleotidyltransferase
MHHHHHGGSGSHGIRTIDSDFGKKQQKKGDNHDSSATYEIKFHEFVLFILEEKMGATRRTFLTDLARKKGFRVENELTDEVTHIVAENLSRSEVLAWLKEHKMEKTKQFELLDISWLIESMKVGKPVDTKGKYQLAESVEVSANPDPTEGRVNELPPTMKTVQPYACQRRTTLNNRNQRFTDSLEILRENYELKGNDDTALEFRRAISVLKSLPFEVRSLKDTEGLPWISDEVKGIMEEIIEVGESREVQAVLNDEWYQSFHAFTRVFGVGVKTADKWYRMGLRTLEDVRSSKTLKLTPWQKVGLLYYEDLARGVTRAEADAIWLLVLDAVATFDPDAIVEIVGGFRRGKPQGHDVDLLISSGGAEKEQEDQLLQKVMNLWKKQGLLLCGRLEWSQWEWGGSPSGKADEGDAEASCFLILKLYDHLVRKSKRNMPTGSNMGESKPWKAIKVDLLRCPRGSFAFAMLQWTGSRMFRRDLRDYALEEKNMMLDNHSLYDMTRGIQLPAKSEEEIFEHLGLEYLEPFERNA

SEQ ID NO: 4543 - DNA, 1584 bp, synthetic construct
  misc_feature 1..1584: note = Variant of terminal deoxynucleotidyltransferase
  source 1..1584: mol_type = other DNA
atgcaccatcatcatcatggcggtagcggcagccacggcattcgtaccatcgattcggacttcgggaagaaacagcagaaaaaaggcgataaccacgatagttccgccacttatgaaatcaaatttcacgagtttgtgctgttcattctcgaagaaaaaatgggtgcgacgcgtcgtacttttctgacagatttagcccgcaagaaagggttccgcgtcgagaatgaactgaccgacgaagttacccacatcgtggcagaaaatctgtcacgctctgaagtattggcttggctgaaagaacacaagatggagaagaccaagcaattcgaactgctggatattagctggcttatcgaaagcatgaaagttggtaaaccggtggacaccaaggggaaataccagttggcggaatcggttgaggtgagtgcgaacccagatccgacagaaggtcgtgtaaacgagctgcctcctactatgaaaaccgttcagccgtatgcgtgtcaacgccgcaccaccctgaacaaccgtaatcaacgttttacggactcgctggagattcttcgtgaaaattacgagctgaaaggcaacgacgatactgcgctggaatttcgtcgtgctatctccgtgctgaaaagccttccgtttgaggtacgtagcctgaaagacacggaaggattgccctggatcagtgatgaagtcaaagggattatggaagaaatcatcgaagtcggggagtcgcgtgaagtgcaggccgtgctcaatgatgagtggtatcaaagcttccacgcatttacgcgtgtctttggagtgggggtgaagacagcagacaagtggtaccgtatgggtctgcgcaccctcgaggatgttcgttccagcaagaccctgaagttgaccccgtggcagaaagtaggtctgctgtattatgaagatcttgctcgcggcgttacgcgtgccgaagctgacgcgatttggctgctggttcaggatgcagtcgcaactttcgacccggatgcgatcgtggagattgtcggtggatttcgtcgtgggaaacctcagggtcacgacgttgatctgcttatcagttcgggtggagctgaaaaagagcaagaagaccaactcctgcagaaagtgatgaatctgtggaagaaacaagggttgttgctgtgtggtcgtctggaatggagtcagtgggaatgggggggttcgccttccggtaaggctgatgagggtgacgcggaggcgtcgtgctttctgatcctcaaactttatgatcatctggtgcgcaaaagtaaacgcaatatgccgactggttcgaacatgggcgagtccaaaccgtggaaagcaattaaagtagatctgctgcgttgcccccgcggcagttttgcgtttgcgatgttgcagtggaccggaagccgcatgttccgtcgtgatctgcgcgattacgccctggaacagaagaacatgatgctggacaatcattcgctgtatgacatgactcgtggtatccaactccctgctaaatcggaagaggaaattttcgaacatctggggcttgaatacctggaaccgttcgaacgtaacgca

SEQ ID NO: 4544 - protein, 528 aa, synthetic construct
  REGION 1..528: note = Variant of terminal deoxynucleotidyltransferase
MHHHHHGGSGSHGIRTIDSDFGKKQQKKGDNHDSSATYEIKFHEFVLFILEEKMGATRRTFLTDLARKKGFRVENELTDEVTHIVAENLSRSEVLAWLKEHKMEKTKQFELLDISWLIESMKVGKPVDTKGKYQLAESVEVSANPDPTEGRVNELPPTMKTVQPYACQRRTTLNNRNQRFTDSLEILRENYELKGNDDTALEFRRAISVLKSLPFEVRSLKDTEGLPWISDEVKGIMEEIIEVGESREVQAVLNDEWYQSFHAFTRVFGVGVKTADKWYRMGLRTLEDVRSSKTLKLTPWQKVGLLYYEDLARGVTRAEADAIWLLVQDAVATFDPDAIVEIVGGFRRGKPQGHDVDLLISSGGAEKEQEDQLLQKVMNLWKKQGLLLCGRLEWSQWEWGGSPSGKADEGDAEASCFLILKLYDHLVRKSKRNMPTGSNMGESKPWKAIKVDLLRCPRGSFAFAMLQWTGSRMFRRDLRDYALEQKNMMLDNHSLYDMTRGIQLPAKSEEEIFEHLGLEYLEPFERNA

SEQ ID NO: 4545 - DNA, 1584 bp, synthetic construct
  misc_feature 1..1584: note = Variant of terminal deoxynucleotidyltransferase
  source 1..1584: mol_type = other DNA
atgcaccatcatcatcatggcggtagcggcagccacggcattcgtaccatcgattcggacttcgggaagaaacagcagaaaaaaggcgataaccacgatagttccgccacttatgaaatcaaatttcacgagtttgtgctgttcattctcgaagaaaaaatgggtgcgacgcgtcgtacttttctgacagatttagcccgcaagaaagggttccgcgtcgagaatgaactgaccgacgaagttacccacatcgtggcagaaaatctgtcacgctctgaagtattggcttggctgaaagaacacaagatggagaagaccaagcaattcgaactgctggatattagctggcttatcgaaagcatgaaagttggtaaaccggtggacaccaaggggaaataccagttggcggaatcggttgaggtgagtgcgaacccagatccgacagaaggtcgtgtaaacgagctgcctcctactatgaaaaccgtttcgccgtatgcgtgtcaacgccgcaccaccctgaacaaccgtaatcaacgttttacggactcgctggagattcttcgtgaaatgtacgagctgaaaggcaacgacgatactgcgctggaatttcgtcgtgctatctccgtgctgaaaagccttccgtttgaggtacgtagcctgaaagacacggaaggattgccctggatcagtgatgaagtcaaagggattatggaagaaatcatcgaagtcggggagtcgcgtgaagtgcaggccgtgctcaatgatgagtggtatcaaagcttccacgcatttacgcgtgtctttggagtgggggtgaagacagcagacaagtggtaccgtatgggtctgcgcaccctcgaggatgttcgttccagcaagaccctgaagttgaccccgtggcagaaagtaggtctgctgtattatgaagatcttgctcgcggcgttacgcgtgccgaagctgacgcgatttggctgctggttcaggatgcagtcgcaactttcgacccggatgcgatcgtggagattgtcggtggatttcgtcgtgggaaacctcagggtcacgacgttgatctgcttatcagttcgcctggagctgaaaaagagcaagaagaccaactcctgcagaaagtgatgaatctgtggaagaaacaagggttgttgctgtgtggtcgtctggaatggagtcagtgggaatgggggggttcgccttccggtaaggctgatgagggtgacgcggaggcgtcgtgctttctgatcctcaaactttatgatcatctggtgcgcaaaagtaaacgcaatatgccgactggttcgaacatgggcgagtccaaaccgtggaaagcaattaaagtagatctgctgcgttgcccccgcggcagttttgcgtttgcgatgttgcagtggaccggaagccgcatgttccgtcgtgatctgcgcgattacgccctggaacagaagaacatgatgctggacaatcattcgctgtatgacatgactcgtggtatccaactccctgctaaatcggaagaggaaattttcgaacatctggggcttgaatacctggaaccgttcgaacgtaacgca

SEQ ID NO: 4546 - protein, 528 aa, synthetic construct
  REGION 1..528: note = Variant of terminal deoxynucleotidyltransferase
MHHHHHGGSGSHGIRTIDSDFGKKQQKKGDNHDSSATYEIKFHEFVLFILEEKMGATRRTFLTDLARKKGFRVENELTDEVTHIVAENLSRSEVLAWLKEHKMEKTKQFELLDISWLIESMKVGKPVDTKGKYQLAESVEVSANPDPTEGRVNELPPTMKTVSPYACQRRTTLNNRNQRFTDSLEILREMYELKGNDDTALEFRRAISVLKSLPFEVRSLKDTEGLPWISDEVKGIMEEIIEVGESREVQAVLNDEWYQSFHAFTRVFGVGVKTADKWYRMGLRTLEDVRSSKTLKLTPWQKVGLLYYEDLARGVTRAEADAIWLLVQDAVATFDPDAIVEIVGGFRRGKPQGHDVDLLISSPGAEKEQEDQLLQKVMNLWKKQGLLLCGRLEWSQWEWGGSPSGKADEGDAEASCFLILKLYDHLVRKSKRNMPTGSNMGESKPWKAIKVDLLRCPRGSFAFAMLQWTGSRMFRRDLRDYALEQKNMMLDNHSLYDMTRGIQLPAKSEEEIFEHLGLEYLEPFERNA

SEQ ID NO: 4547 - DNA, 1584 bp, synthetic construct
  misc_feature 1..1584: note = Variant of terminal deoxynucleotidyltransferase
  source 1..1584: mol_type = other DNA
atgcaccatcatcatcatggcggtagcggcagccacggcattcgtaccatcgattcggacttcgggaagaaacagcagaaaaaaggcgataaccacgatagttccgccacttatgaaatcaaatttcacgagtttgtgctgttcattctcgaagaaaaaatgggtgcgacgcgtcgtacttttctgacagatttagcccgcaagaaagggttccgcgtcgagaatgaactgaccgacgaagttacccacatcgtggcagaaaatctgtcacgctctgaagtattggcttggctgaaagaacacaagatggagaagaccaagcaattcgaactgctggatattagctggcttatcgaaagcatgaaagttggtaaaccggtggacaccaaggggaaataccagttggcggaatcggttgaggtgagtgcgaacccagatccgacagaaggtcgtgtaaacgagctgcctcctactatgaaaaccgtttcgccgtatgcgtgtcaacgccgcaccaccctgaacaaccgtaatcaacgttttacggactcgctggagattcttcgtgaaaattacgagctgaaaggcaacgacgatactgcgctggaatttcgtcgtgctatctccgtgctgaaaagccttccgtttgaggtacgtagcctgaaagacacggaaggattgccctggatcagtgatgaagtcaaagggattatggaagaaatcatcgaagtcggggagtcgcgtgaagtgcaggccgtgctcaatgatgagtggtatcaaagcttccacgcatttacgcgtgtctttggagtgggggtgaagacagcagacaagtggtaccgtatgggtctgcgcaccctcgaggatgttcgttccagcaagaccctgaagttgaccccgtggcagaaagtaggtctgctgtattatgaagatcttgctcgcggcgttacgcgtgccgaagctgacgcgatttggctgctggttcaggatgcagtcgcaactttcgacccggatgcgatcgtggagattgtcggtggatttcgtcgtgggaaacctcagggtcacgacgttgatctgcttatcagtacgggtggagctgaaaaagagcaagaagaccaactcctgcagaaagtgatgaatctgtggaagaaacaagggttgttgctgtgtggtcgtctggaatggagtcagtgggaatgggggggttcgccttccggtaaggctgatgagggtgacgcggaggcgtcgtgctttctgatcctcaaactttatgatcatctggtgcgtaaaagtaaacgcaatatgccgactggttcgaacatgggcgagtccaaaccgtggaaagcaattaaagtagatctgctgcgttgcccccgcggcagttttgcgtttgcgatgttgcagtggaccggaagccgcatgttccgtcgtgatctgcgctggtacgccctggaagagaagaacatgatgctggacaatcattcgctgtatgacatgactcgtggtatccaactccctgctaaatcggaagaggaaattttcgaacatctggggcttgaatacctggaaccgttcgaacgtaacgca

SEQ ID NO: 4548 - protein, 528 aa, synthetic construct
  REGION 1..528: note = Variant of terminal deoxynucleotidyltransferase
MHHHHHGGSGSHGIRTIDSDFGKKQQKKGDNHDSSATYEIKFHEFVLFILEEKMGATRRTFLTDLARKKGFRVENELTDEVTHIVAENLSRSEVLAWLKEHKMEKTKQFELLDISWLIESMKVGKPVDTKGKYQLAESVEVSANPDPTEGRVNELPPTMKTVSPYACQRRTTLNNRNQRFTDSLEILRENYELKGNDDTALEFRRAISVLKSLPFEVRSLKDTEGLPWISDEVKGIMEEIIEVGESREVQAVLNDEWYQSFHAFTRVFGVGVKTADKWYRMGLRTLEDVRSSKTLKLTPWQKVGLLYYEDLARGVTRAEADAIWLLVQDAVATFDPDAIVEIVGGFRRGKPQGHDVDLLISTGGAEKEQEDQLLQKVMNLWKKQGLLLCGRLEWSQWEWGGSPSGKADEGDAEASCFLILKLYDHLVRKSKRNMPTGSNMGESKPWKAIKVDLLRCPRGSFAFAMLQWTGSRMFRRDLRWYALEEKNMMLDNHSLYDMTRGIQLPAKSEEEIFEHLGLEYLEPFERNA

SEQ ID NO: 4549 - DNA, 1584 bp, synthetic construct
  misc_feature 1..1584: note = Variant of terminal deoxynucleotidyltransferase
  source 1..1584: mol_type = other DNA
atgcaccatcatcatcatggcggtagcggcagccacggcattcgtaccatcgattcggacttcgggaagaaacagcagaaaaaaggcgataaccacgatagttccgccacttatgaaatcaaatttcacgagtttgtgctgttcattctcgaagaaaaaatgggtgcgacgcgtcgtacttttctgacagatttagcccgcaagaaagggttccgcgtcgagaatgaactgaccgacgaagttacccacatcgtggcagaaaatctgtcacgctctgaagtattggcttggctgaaagaacacaagatggagaagaccaagcaattcgaactgctggatattagctggcttatcgaaagcatgaaagttggtaaaccggtggacaccaaggggaaataccagttggcggaatcggttgaggtgagtgcgaacccagatccgacagaaggtcgtgtaaacgagctgcctcctactatgaaaaccgtttcgccgtatgcgtgtcaacgccgcaccaccctgaacaaccgtaatcaacgttttacggactcgctggagattcttcgtgaaaattacgagctgaaaggcaacgacgatactgcgctggagatccgtcgtgctatctccgtgctgaaaagccttccgtttgaggtacgtagcctgaaagacacggaaggattgccctggatcagtgatgaagtcaaagggattatggaagaaatcatcgaagtcggggagtcgcgtgaagtgcaggccgtgctcaatgatgagtggtatcaaagcttccacgcatttacgcgtgtctttggagtgggggtgaagacagcagacaagtggtaccgtatgggtctgcgcaccctcgaggatgttcgttccagcaagaccctgaagttgaccccgtggcagaaagtaggtctgctgtattatgaagatcttgctcgcggcgttacgcgtgccgaagctgacgcgatttggctgctggttcaggatgcagtcgcaactttcgacccggatgcgatcgtggagattgtcggtggatttcgtcgtgggaaacctcagggtcacgacgttgatctgcttatcagtacgcctggagctagtaaagagcaagaagaccaactcctgcagaaagtgatgaatctgtggaagaaacaagggttgttgctgtgtggtcgtctggaatggagtcagtgggaatgggggggttcgccttccggtaaggctgatgagggtgacgcggaggcgtcgtgctttctgatcctcaaactttatgatcatctggtgcgtaaaagtaaacgcaatatgccgactggttcgaacatgggcgagtccaaaccgtggaaagcaattaaagtagatctgctgcgttgcccccgcggcagttttgcgtttgcgatgttgcagtggaccggaagccgcatgttccgtcgtgatctgcgctggtacgccctggaagagaagaacatgatgctggacaatcattcgctgtatgacatgactcgtggtatccaactccctgctaaatcggaagaggaaattttcgaacatctggggcttgaatacctggaaccgttcgaacgtaacgca

SEQ ID NO: 4550 - protein, 528 aa, synthetic construct
  REGION 1..528: note = Variant of terminal deoxynucleotidyltransferase
MHHHHHGGSGSHGIRTIDSDFGKKQQKKGDNHDSSATYEIKFHEFVLFILEEKMGATRRTFLTDLARKKGFRVENELTDEVTHIVAENLSRSEVLAWLKEHKMEKTKQFELLDISWLIESMKVGKPVDTKGKYQLAESVEVSANPDPTEGRVNELPPTMKTVSPYACQRRTTLNNRNQRFTDSLEILRENYELKGNDDTALEIRRAISVLKSLPFEVRSLKDTEGLPWISDEVKGIMEEIIEVGESREVQAVLNDEWYQSFHAFTRVFGVGVKTADKWYRMGLRTLEDVRSSKTLKLTPWQKVGLLYYEDLARGVTRAEADAIWLLVQDAVATFDPDAIVEIVGGFRRGKPQGHDVDLLISTPGASKEQEDQLLQKVMNLWKKQGLLLCGRLEWSQWEWGGSPSGKADEGDAEASCFLILKLYDHLVRKSKRNMPTGSNMGESKPWKAIKVDLLRCPRGSFAFAMLQWTGSRMFRRDLRWYALEEKNMMLDNHSLYDMTRGIQLPAKSEEEIFEHLGLEYLEPFERNA

SEQ ID NO: 4551 - DNA, 1584 bp, synthetic construct
  misc_feature 1..1584: note = Variant of terminal deoxynucleotidyltransferase
  source 1..1584: mol_type = other DNA
atgcaccatcatcatcatggcggtagcggcagccacggcattcgtaccatcgattcggacttcgggaagaaacagcagaaaaaaggcgataaccacgatagttccgccacttatgaaatcaaatttcacgagtttgtgctgttcattctcgaagaaaaaatgggtgcgacgcgtcgtacttttctgacagatttagcccgcaagaaagggttccgcgtcgagaatgaactgaccgacgaagttacccacatcgtggcagaaaatctgtcacgctctgaagtattggcttggctgaaagaacacaagatggagaagaccaagcaattcgaactgctggatattagctggcttatcgaaagcatgaaagttggtaaaccggtggacaccaaggggaaataccagttggcggaatcggttgaggtgagtgcgaacccagatccgacagaaggtcgtgtaaacgagctgcctcctactatgaaaaccgtttctccgtatgcgtgtcaacgccgcaccaccctgaacaaccgtaatcaacgttttacggactcgctggagattcttcgtgaaaattacgagctgaaaggcaacgacgatactgcgctggagatccgtcgtgctatctccgtgctgaaaagccttccgtttgaggtacgtagcctgaaagacacggaaggattgccctggatcagtgatgaagtcaaagggattatggaagaaatcatcgaagtcggggagtcgcgtgaagtgcaggccgtgctcaatgatgagtggtatcaaagcttccacgcatttacgcgtgtctttggagtgggggtgaagacagcagacaagtggtaccgtatgggtctgcgcaccctcgaggatgttcgttccagcaagaccctgaagttgaccccgtggcagaaagtaggtctgctgtattatgaagatcttgctcgcggcgttacgcgtgccgaagctgacgcgatttggctgctggttcaggatgcagtcgcaactttcgacccggatgcgatcgtggagattgtcggtggatttcgtcgtgggaaacctcagggtcacgacgttgatctgcttatcagttctccgggagctgaaaaagagcaagaagaccaactcctgcagaaagtgatgaatctgtggaagaaacaagggttgttgctgtgtggtcgtctggaatggagtcagtgggaatgggggggttcgccttccggtaaggctgatgagggtgacgcggaggcgtcgtgctttctgatcctcaaactttatgatcatctggtgcgcaaaagtaaacgcaatatgccgactggttcgaacatgggcgagtccaaaccgtggaaagcaattaaagtagatctgctgcgttgcccccgcggcagttttgcgtttgcgatgttgcagtggaccggaagccgcatgttccgtcgtgatctgcgctggtacgccctggaagagaagaacatgatgctggacaatcattcgctgtatgaccctagtcgtggtatcggtctccctgctaaatcggaagaggaaattttcgaacatctggggcttgaatacctggaaccgttcgaacgtaacgca

SEQ ID NO: 4552 - protein, 528 aa, synthetic construct
  REGION 1..528: note = Variant of terminal deoxynucleotidyltransferase
MHHHHHGGSGSHGIRTIDSDFGKKQQKKGDNHDSSATYEIKFHEFVLFILEEKMGATRRTFLTDLARKKGFRVENELTDEVTHIVAENLSRSEVLAWLKEHKMEKTKQFELLDISWLIESMKVGKPVDTKGKYQLAESVEVSANPDPTEGRVNELPPTMKTVSPYACQRRTTLNNRNQRFTDSLEILRENYELKGNDDTALEIRRAISVLKSLPFEVRSLKDTEGLPWISDEVKGIMEEIIEVGESREVQAVLNDEWYQSFHAFTRVFGVGVKTADKWYRMGLRTLEDVRSSKTLKLTPWQKVGLLYYEDLARGVTRAEADAIWLLVQDAVATFDPDAIVEIVGGFRRGKPQGHDVDLLISSPGAEKEQEDQLLQKVMNLWKKQGLLLCGRLEWSQWEWGGSPSGKADEGDAEASCFLILKLYDHLVRKSKRNMPTGSNMGESKPWKAIKVDLLRCPRGSFAFAMLQWTGSRMFRRDLRWYALEEKNMMLDNHSLYDPSRGIGLPAKSEEEIFEHLGLEYLEPFERNA

SEQ ID NO: 4553 - DNA, 1584 bp, synthetic construct
  misc_feature 1..1584: note = Variant of terminal deoxynucleotidyltransferase
  source 1..1584: mol_type = other DNA
atgcaccatcatcatcatggcggtagcggcagccacggcattcgtaccatcgattcggacttcgggaagaaacagcagaaaaaaggcgataaccacgatagttccgccacttatgaaatcaaatttcacgagtttgtgctgttcattctcgaagaaaaaatgggtgcgacgcgtcgtacttttctgacagatttagcccgcaagaaagggttccgcgtcgagaatgaactgaccgacgaagttacccacatcgtggcagaaaatctgtcacgctctgaagtattggcttggctgaaagaacacaagatggagaagaccaagcaattcgaactgctggatattagctggcttatcgaaagcatgaaagttggtaaaccggtggacaccaaggggaaataccagttggcggaatcggttgaggtgagtgcgaacccagatccgacagaaggtcgtgtaaacgagctgcctcctactatgaaaaccgtttcgccgtatgcgtgtcaacgccgcaccaccctgaacaaccgtaatcaacgttttacggactcgctggagattcttcgtgaaatgtacgagctgaaaggcaacgacgatactgcgctgcgcatccgtcgtgctatctccgtgctgaaaagccttccgtttgaggtacgtagcctgaaagacacggaaggattgccctggatcagtgatgaagtcaaagggattatggaagaaatcatcgaagtcggggagtcgcgtgaagtgcaggccgtgctcaatgatgagtggtatcaaagcttccacgcatttacgcgtgtctttggagtgggggtgaagacagcagacaagtggtaccgtatgggtctgcgcaccctcgaggatgttcgttccagcaagaccctgaagttgaccccgtggcagaaagtaggtctgctgtattatgaagatcttgctcgcggcgttacgcgtgccgaagctgacgcgatttggctgctggttcaggatgcagtcgcaactttcgacccggatgcgatcgtggagattgtcggtggatttcgtcgtgggaaacctcagggtcacgacgttgatctgcttatcagttcgggtggagctagtaaagagcaagaagaccaactcctgcagaaagtgatgaatctgtggaagaaacaagggttgttgctgtgtggtcgtctggaatggagtcagtgggaatgggggggttcgccttccggtaaggctgatgagggtgacgcggaggcgtcgtgctttctgatcctcaaactttatgatcatctggtgcgcaaaagtaaacgcaatatgccgactggttcgaacatgggcgagtccaaaccgtggaaagcaattaaagtagatctgctgcgttgcccccgcggcagttttgcgtttgcgatgttgcagtggaccggaagccgcatgttccgtcgtgatctgcgcgattacgcccgcgaacagaagaacatgatgctggacaatcattcgctgtatgacatgactcgtggtatccaactccctgctaaatcggaagaggaaattttcgaacatctggggcttgaatacctggaaccgttcgaacgtaacgca

SEQ ID NO: 4554 - protein, 528 aa, synthetic construct
  REGION 1..528: note = Variant of terminal deoxynucleotidyltransferase
MHHHHHGGSGSHGIRTIDSDFGKKQQKKGDNHDSSATYEIKFHEFVLFILEEKMGATRRTFLTDLARKKGFRVENELTDEVTHIVAENLSRSEVLAWLKEHKMEKTKQFELLDISWLIESMKVGKPVDTKGKYQLAESVEVSANPDPTEGRVNELPPTMKTVSPYACQRRTTLNNRNQRFTDSLEILREMYELKGNDDTALRIRRAISVLKSLPFEVRSLKDTEGLPWISDEVKGIMEEIIEVGESREVQAVLNDEWYQSFHAFTRVFGVGVKTADKWYRMGLRTLEDVRSSKTLKLTPWQKVGLLYYEDLARGVTRAEADAIWLLVQDAVATFDPDAIVEIVGGFRRGKPQGHDVDLLISSGGASKEQEDQLLQKVMNLWKKQGLLLCGRLEWSQWEWGGSPSGKADEGDAEASCFLILKLYDHLVRKSKRNMPTGSNMGESKPWKAIKVDLLRCPRGSFAFAMLQWTGSRMFRRDLRDYAREQKNMMLDNHSLYDMTRGIQLPAKSEEEIFEHLGLEYLEPFERNA

SEQ ID NO: 4555 - DNA, 1584 bp, synthetic construct
  misc_feature 1..1584: note = Variant of terminal deoxynucleotidyltransferase
  source 1..1584: mol_type = other DNA
atgcaccatcatcatcatggcggtagcggcagccacggcattcgtaccatcgattcggacttcgggaagaaacagcagaaaaaaggcgataaccacgatagttccgccacttatgaaatcaaatttcacgagtttgtgctgttcattctcgaagaaaaaatgggtgcgacgcgtcgtacttttctgacagatttagcccgcaagaaagggttccgcgtcgagaatgaactgaccgacgaagttacccacatcgtggcagaaaatctgtcacgctctgaagtattggcttggctgaaagaacacaagatggagaagaccaagcaattcgaactgctggatattagctggcttatcgaaagcatgaaagttggtaaaccggtggacaccaaggggaaataccagttggcggaatcggttgaggtgagtgcgaacccagatccgacagaaggtcgtgtaaacgagctgcctcctactatgaaaaccgttcagccgtatgcgtgtcaacgccgcaccaccctgaacaaccgtaatcaacgttttacggactcgctggagattcttcgtgaaatgtacgagctgaaaggcaacgacgatactgcgctggagttccgtcgtgctatctccgtgctgaaaagccttccgtttgaggtacgtagcctgaaagacacggaaggattgccctggatcagtgatgaagtcaaagggattatggaagaaatcatcgaagtcggggagtcgcgtgaagtgcaggccgtgctcaatgatgagtggtatcaaagcttccacgcatttacgcgtgtctttggagtgggggtgaagacagcagacaagtggtaccgtatgggtctgcgcaccctcgaggatgttcgttccagcaagaccctgaagttgaccccgtggcagaaagtaggtctgctgtattatgaagatcttgctcgcggcgttacgcgtgccgaagctgacgcgatttggctgctggttcaggatgcagtcgcaactttcgacccggatgcgatcgtggagattgtcggtggatttcgtcgtgggaaacctcagggtcacgacgttgatctgcttatcagttctccgggagctgaaaaagagcaagaagaccaactcctgcagaaagtgatgaatctgtggaagaaacaagggttgttgctgtgtggtcgtctggaatggagtcagtgggaatgggggggttcgccttccggtaaggctgatgagggtgacgcggaggcgtcgtgctttctgatcctcaaactttatgatcatctggtgcgcaaaagtaaacgcaatatgccgactggttcgaacatgggcgagtccaaaccgtggaaagcaattaaagtagatctgctgcgttgcccccgcggcagttttgcgtttgcgatgttgcagtggaccggaagccgcatgttccgtcgtgatctgcgctggtacgccctggaagagaagaacatgatgctggacaatcattcgctgtatgacatgactcgtggtatccaactccctgctaaatcggaagaggaaattttcgaacatctggggcttgaatacctggaaccgttcgaacgtaacgca

SEQ ID NO: 4556 - protein, 528 aa, synthetic construct
  REGION 1..528: note = Variant of terminal deoxynucleotidyltransferase
MHHHHHGGSGSHGIRTIDSDFGKKQQKKGDNHDSSATYEIKFHEFVLFILEEKMGATRRTFLTDLARKKGFRVENELTDEVTHIVAENLSRSEVLAWLKEHKMEKTKQFELLDISWLIESMKVGKPVDTKGKYQLAESVEVSANPDPTEGRVNELPPTMKTVQPYACQRRTTLNNRNQRFTDSLEILREMYELKGNDDTALEFRRAISVLKSLPFEVRSLKDTEGLPWISDEVKGIMEEIIEVGESREVQAVLNDEWYQSFHAFTRVFGVGVKTADKWYRMGLRTLEDVRSSKTLKLTPWQKVGLLYYEDLARGVTRAEADAIWLLVQDAVATFDPDAIVEIVGGFRRGKPQGHDVDLLISSPGAEKEQEDQLLQKVMNLWKKQGLLLCGRLEWSQWEWGGSPSGKADEGDAEASCFLILKLYDHLVRKSKRNMPTGSNMGESKPWKAIKVDLLRCPRGSFAFAMLQWTGSRMFRRDLRWYALEEKNMMLDNHSLYDMTRGIQLPAKSEEEIFEHLGLEYLEPFERNA

SEQ ID NO: 4557 - DNA, 1584 bp, synthetic construct
  misc_feature 1..1584: note = Variant of terminal deoxynucleotidyltransferase
  source 1..1584: mol_type = other DNA
atgcaccatcatcatcatggcggtagcggcagccacggcattcgtaccatcgattcggacttcgggaagaaacagcagaaaaaaggcgataaccacgatagttccgccacttatgaaatcaaatttcacgagtttgtgctgttcattctcgaagaaaaaatgggtgcgacgcgtcgtacttttctgacagatttagcccgcaagaaagggttccgcgtcgagaatgaactgaccgacgaagttacccacatcgtggcagaaaatctgtcacgctctgaagtattggcttggctgaaagaacacaagatggagaagaccaagcaattcgaactgctggatattagctggcttatcgaaagcatgaaagttggtaaaccggtggacaccaaggggaaataccagttggcggaatcggttgaggtgagtgcgaacccagatccgacagaaggtcgtgtaaacgagctgcctcctactatgaaaaccgtttctccgtatgcgtgtcaacgccgcaccaccctgaacaaccgtaatcaacgttttacggactcgctggagattcttcgtgaaatgtacgagctgaaaggcaacgacgatactgcgctgcgcatccgtcgtgctatctccgtgctgaaaagccttccgtttgaggtacgtagcctgaaagacacggaaggattgccctggatcagtgatgaagtcaaagggattatggaagaaatcatcgaagtcggggagtcgcgtgaagtgcaggccgtgctcaatgatgagtggtatcaaagcttccacgcatttacgcgtgtctttggagtgggggtgaagacagcagacaagtggtaccgtatgggtctgcgcaccctcgaggatgttcgttccagcaagaccctgaagttgaccccgtggcagaaagtaggtctgctgtattatgaagatcttgctcgcggcgttacgcgtgccgaagctgacgcgatttggctgctggttcaggatgcagtcgcaactttcgacccggatgcgatcgtggagattgtcggtggatttcgtcgtgggaaacctcagggtcacgacgttgatctgcttatcagttctccgggagctgaaaaagagcaagaagaccaactcctgcagaaagtgatgaatctgtggaagaaacaagggttgttgctgtgtggtcgtctggaatggagtcagtgggaatgggggggttcgccttccggtaaggctgatgagggtgacgcggaggcgtcgtgctttctgatcctcaaactttatgatcatctggtgcgcaaaagtaaacgcaatatgccgactggttcgaacatgggcgagtccaaaccgtggaaagcaattaaagtagatctgctgcgttgcccccgcggcagttttgcgtttgcgatgttgcagtggaccggaagccgcatgttccgtcgtgatctgcgcgattacgccctggaagagaagaacatgatgctggacaatcattcgctgtatgacatgactcgtggtatccaactccctgctaaatcggaagaggaaattttcgaacatctggggcttgaatacctggaaccgttcgaacgtaacgca

SEQ ID NO: 4558 - protein, 528 aa, synthetic construct
  REGION 1..528: note = Variant of terminal deoxynucleotidyltransferase
MHHHHHGGSGSHGIRTIDSDFGKKQQKKGDNHDSSATYEIKFHEFVLFILEEKMGATRRTFLTDLARKKGFRVENELTDEVTHIVAENLSRSEVLAWLKEHKMEKTKQFELLDISWLIESMKVGKPVDTKGKYQLAESVEVSANPDPTEGRVNELPPTMKTVSPYACQRRTTLNNRNQRFTDSLEILREMYELKGNDDTALRIRRAISVLKSLPFEVRSLKDTEGLPWISDEVKGIMEEIIEVGESREVQAVLNDEWYQSFHAFTRVFGVGVKTADKWYRMGLRTLEDVRSSKTLKLTPWQKVGLLYYEDLARGVTRAEADAIWLLVQDAVATFDPDAIVEIVGGFRRGKPQGHDVDLLISSPGAEKEQEDQLLQKVMNLWKKQGLLLCGRLEWSQWEWGGSPSGKADEGDAEASCFLILKLYDHLVRKSKRNMPTGSNMGESKPWKAIKVDLLRCPRGSFAFAMLQWTGSRMFRRDLRDYALEEKNMMLDNHSLYDMTRGIQLPAKSEEEIFEHLGLEYLEPFERNA

SEQ ID NO: 4559 - DNA, 1584 bp, synthetic construct
  misc_feature 1..1584: note = Variant of terminal deoxynucleotidyltransferase
  source 1..1584: mol_type = other DNA
atgcaccatcatcatcatggcggtagcggcagccacggcattcgtaccatcgattcggacttcgggaagaaacagcagaaaaaaggcgataaccacgatagttccgccacttatgaaatcaaatttcacgagtttgtgctgttcattctcgaagaaaaaatgggtgcgacgcgtcgtacttttctgacagatttagcccgcaagaaagggttccgcgtcgagaatgaactgaccgacgaagttacccacatcgtggcagaaaatctgtcacgctctgaagtattggcttggctgaaagaacacaagatggagaagaccaagcaattcgaactgctggatattagctggcttatcgaaagcatgaaagttggtaaaccggtggacaccaaggggaaataccagttggcggaatcggttgaggtgagtgcgaacccagatccgacagaaggtcgtgtaaacgagctgcctcctactatgaaaaccgtttctccgtatgcgtgtcaacgccgcaccaccctgaacaaccgtaatcaacgttttacggactcgctggagattcttcgtgaaaattacgagctgaaaggcaacgacgatactgcgctggaatttcgtcgtgctatctccgtgctgaaaagccttccgtttgaggtacgtagcctgaaagacacggaaggattgccctggatcagtgatgaagtcaaagggattatggaagaaatcatcgaagtcggggagtcgcgtgaagtgcaggccgtgctcaatgatgagtggtatcaaagcttccacgcatttacgcgtgtctttggagtgggggtgaagacagcagacaagtggtaccgtatgggtctgcgcaccctcgaggatgttcgttccagcaagaccctgaagttgaccccgtggcagaaagtaggtctgctgtattatgaagatcttgctcgcggcgttacgcgtgccgaagctgacgcgatttggctgctggttctggatgcagtcgcaactttcgacccggatgcgatcgtggagattgtcggtggatttcgtcgtgggaaacctcagggtcacgacgttgatctgcttatcagttctccgggagctgaaaaagagcaagaagaccaactcctgcagaaagtgatgaatctgtggaagaaacaagggttgttgctgtgtggtcgtctggaatggagtcagtgggaatgggggggttcgccttccggtaaggctgatgagggtgacgcggaggcgtcgtgctttctgatcctcaaactttatgatcatctggtggtaaaaagtaaacgcaatatgccgactggttcgaacatgggcgagtccaaaccgtggaaagcaattaaagtagatctgctgcgttgcccccgcggcagttttgcgtttgcgatgttgcagtggaccggaagccgcatgttccgtcgtgatctgcgctggtacgccctggaagagaagaacatgatgctggacaatcattcgctgtatgacatgactcgtggtatccaactccctgctaaatcggaagaggaaattttcgaacatctggggcttgaatacctggaaccgttcgaacgtaacgca

SEQ ID NO: 4560 - protein, 528 aa, synthetic construct
  REGION 1..528: note = Variant of terminal deoxynucleotidyltransferase
MHHHHHGGSGSHGIRTIDSDFGKKQQKKGDNHDSSATYEIKFHEFVLFILEEKMGATRRTFLTDLARKKGFRVENELTDEVTHIVAENLSRSEVLAWLKEHKMEKTKQFELLDISWLIESMKVGKPVDTKGKYQLAESVEVSANPDPTEGRVNELPPTMKTVSPYACQRRTTLNNRNQRFTDSLEILRENYELKGNDDTALEFRRAISVLKSLPFEVRSLKDTEGLPWISDEVKGIMEEIIEVGESREVQAVLNDEWYQSFHAFTRVFGVGVKTADKWYRMGLRTLEDVRSSKTLKLTPWQKVGLLYYEDLARGVTRAEADAIWLLVLDAVATFDPDAIVEIVGGFRRGKPQGHDVDLLISSPGAEKEQEDQLLQKVMNLWKKQGLLLCGRLEWSQWEWGGSPSGKADEGDAEASCFLILKLYDHLVVKSKRNMPTGSNMGESKPWKAIKVDLLRCPRGSFAFAMLQWTGSRMFRRDLRWYALEEKNMMLDNHSLYDMTRGIQLPAKSEEEIFEHLGLEYLEPFERNA

SEQ ID NO: 4561 - DNA, 1584 bp, synthetic construct
  misc_feature 1..1584: note = Variant of terminal deoxynucleotidyltransferase
  source 1..1584: mol_type = other DNA
atgcaccatcatcatcatggcggtagcggcagccacggcattcgtaccatcgattcggacttcgggaagaaacagcagaaaaaaggcgataaccacgatagttccgccacttatgaaatcaaatttcacgagtttgtgctgttcattctcgaagaaaaaatgggtgcgacgcgtcgtacttttctgacagatttagcccgcaagaaagggttccgcgtcgagaatgaactgaccgacgaagttacccacatcgtggcagaaaatctgtcacgctctgaagtattggcttggctgaaagaacacaagatggagaagaccaagcaattcgaactgctggatattagctggcttatcgaaagcatgaaagttggtaaaccggtggacaccaaggggaaataccagttggcggaatcggttgaggtgagtgcgaacccagatccgacagaaggtcgtgtaaacgagctgcctcctactatgaaaaccgtttctccgtatgcgtgtcaacgccgcaccaccctgaacaaccgtaatcaacgttttacggactcgctggagattcttcgtgaaaattacgagctgaaaggcaacgacgatactgcgctggagttccgtcgtgctatctccgtgctgaaaagccttccgtttgaggtacgtagcctgaaagacacggaaggattgccctggatcagtgatgaagtcaaagggattatggaagaaatcatcgaagtcggggagtcgcgtgaagtgcaggccgtgctcaatgatgagtggtatcaaagcttccacgcatttacgcgtgtctttggagtgggggtgaagacagcagacaagtggtaccgtatgggtctgcgcaccctcgaggatgttcgttccagcaagaccctgaagttgaccccgtggcagaaagtaggtctgctgtattatgaagatcttgctcgcggcgttacgcgtgccgaagctgacgcgatttggctgctggttgcggatgcagtcgcaactttcgacccggatgcgatcgtggagattgtcggtggatttcgtcgtgggaaacctcagggtcacgacgttgatctgcttatcagttcgcctggagctgaaaaagagcaagaagaccaactcctgcagaaagtgatgaatctgtggaagaaacaagggttgttgctgtgtggtcgtctggaatggagtcagtgggaatgggggggttcgccttccggtaaggctgatgagggtgacgcggaggcgtcgtgctttctgatcctcaaactttatgatcatctggtgcgcaaaagtaaacgcaatatgccgactggttcgaacatgggcgagtccaaaccgtggaaagcaattaaagtagatctgctgcgttgcccccgcggcagttttgcgtttgcgatgttgcagtggaccggaagccgcatgttccgtcgtgatctgcgctggtacgccctggaacagaagaacatgatgctggacaatcattcgctgtatgacatgactcgtggtatccaactccctgctaaatcggaagaggaaattttcgaacatctggggcttgaatacctggaaccgttcgaacgtaacgca

SEQ ID NO: 4562 - protein, 528 aa, synthetic construct
  REGION 1..528: note = Variant of terminal deoxynucleotidyltransferase
MHHHHHGGSGSHGIRTIDSDFGKKQQKKGDNHDSSATYEIKFHEFVLFILEEKMGATRRTFLTDLARKKGFRVENELTDEVTHIVAENLSRSEVLAWLKEHKMEKTKQFELLDISWLIESMKVGKPVDTKGKYQLAESVEVSANPDPTEGRVNELPPTMKTVSPYACQRRTTLNNRNQRFTDSLEILRENYELKGNDDTALEFRRAISVLKSLPFEVRSLKDTEGLPWISDEVKGIMEEIIEVGESREVQAVLNDEWYQSFHAFTRVFGVGVKTADKWYRMGLRTLEDVRSSKTLKLTPWQKVGLLYYEDLARGVTRAEADAIWLLVADAVATFDPDAIVEIVGGFRRGKPQGHDVDLLISSPGAEKEQEDQLLQKVMNLWKKQGLLLCGRLEWSQWEWGGSPSGKADEGDAEASCFLILKLYDHLVRKSKRNMPTGSNMGESKPWKAIKVDLLRCPRGSFAFAMLQWTGSRMFRRDLRWYALEQKNMMLDNHSLYDMTRGIQLPAKSEEEIFEHLGLEYLEPFERNA

SEQ ID NO: 4563 - DNA, 1584 bp, synthetic construct
  misc_feature 1..1584: note = Variant of terminal deoxynucleotidyltransferase
  source 1..1584: mol_type = other DNA
atgcaccatcatcatcatggcggtagcggcagccacggcattcgtaccatcgattcggacttcgggaagaaacagcagaaaaaaggcgataaccacgatagttccgccacttatgaaatcaaatttcacgagtttgtgctgttcattctcgaagaaaaaatgggtgcgacgcgtcgtacttttctgacagatttagcccgcaagaaagggttccgcgtcgagaatgaactgaccgacgaagttacccacatcgtggcagaaaatctgtcacgctctgaagtattggcttggctgaaagaacacaagatggagaagaccaagcaattcgaactgctggatattagctggcttatcgaaagcatgaaagttggtaaaccggtggacaccaaggggaaataccagttggcggaatcggttgaggtgagtgcgaacccagatccgacagaaggtcgtgtaaacgagctgcctcctactatgaaaaccgtttcgccgtatgcgtgtcaacgccgcaccaccctgaacaaccgtaatcaacgttttacggactcgctggagattcttcgtgaaaattacgagctgaaaggcaacgacgatactgcgctgcgcatccgtcgtgctatctccgtgctgaaaagccttccgtttgaggtacgtagcctgaaagacacggaaggattgccctggatcagtgatgaagtcaaagggattatggaagaaatcatcgaagtcggggagtcgcgtgaagtgcaggccgtgctcaatgatgagtggtatcaaagcttccacgcatttacgcgtgtctttggagtgggggtgaagacagcagacaagtggtaccgtatgggtctgcgcaccctcgaggatgttcgttccagcaagaccctgaagttgaccccgtggcagaaagtaggtctgctgtattatgaagatcttgctcgcggcgttacgcgtgccgaagctgacgcgatttggctgctggttcaggatgcagtcgcaactttcgacccggatgcgatcgtggagattgtcggtggatttcgtcgtgggaaacctcagggtcacgacgttgatctgcttatcagttctccgggagctgaaaaagagcaagaagaccaactcctgcagaaagtgatgaatctgtggaagaaacaagggttgttgctgtgtggtcgtctggaatggagtcagtgggaatgggggggttcgccttccggtaaggctgatgagggtgacgcggaggcgtcgtgctttctgatcctcaaactttatgatcatctggtgcgcaaaagtaaacgcaatatgccgactggttcgaacatgggcgagtccaaaccgtggaaagcaattaaagtagatctgctgcgttgcccccgcggcagttttgcgtttgcgatgttgcagtggaccggaagccgcatgttccgtcgtgatctgcgctggtacgccctggaacagaagaacatgatgctggacaatcattcgctgtatgacatgactcgtggtatccaactccctgctaaatcggaagaggaaattttcgaacatctggggcttgaatacctggaaccgttcgaacgtaacgca

SEQ ID NO: 4564 - protein, 528 aa, synthetic construct
  REGION 1..528: note = Variant of terminal deoxynucleotidyltransferase
MHHHHHGGSGSHGIRTIDSDFGKKQQKKGDNHDSSATYEIKFHEFVLFILEEKMGATRRTFLTDLARKKGFRVENELTDEVTHIVAENLSRSEVLAWLKEHKMEKTKQFELLDISWLIESMKVGKPVDTKGKYQLAESVEVSANPDPTEGRVNELPPTMKTVSPYACQRRTTLNNRNQRFTDSLEILRENYELKGNDDTALRIRRAISVLKSLPFEVRSLKDTEGLPWISDEVKGIMEEIIEVGESREVQAVLNDEWYQSFHAFTRVFGVGVKTADKWYRMGLRTLEDVRSSKTLKLTPWQKVGLLYYEDLARGVTRAEADAIWLLVQDAVATFDPDAIVEIVGGFRRGKPQGHDVDLLISSPGAEKEQEDQLLQKVMNLWKKQGLLLCGRLEWSQWEWGGSPSGKADEGDAEASCFLILKLYDHLVRKSKRNMPTGSNMGESKPWKAIKVDLLRCPRGSFAFAMLQWTGSRMFRRDLRWYALEQKNMMLDNHSLYDMTRGIQLPAKSEEEIFEHLGLEYLEPFERNA

SEQ ID NO: 4565 - DNA, 1584 bp, synthetic construct
  misc_feature 1..1584: note = Variant of terminal deoxynucleotidyltransferase
  source 1..1584: mol_type = other DNA
atgcaccatcatcatcatggcggtagcggcagccacggcattcgtaccatcgattcggacttcgggaagaaacagcagaaaaaaggcgataaccacgatagttccgccacttatgaaatcaaatttcacgagtttgtgctgttcattctcgaagaaaaaatgggtgcgacgcgtcgtacttttctgacagatttagcccgcaagaaagggttccgcgtcgagaatgaactgaccgacgaagttacccacatcgtggcagaaaatctgtcacgctctgaagtattggcttggctgaaagaacacaagatggagaagaccaagcaattcgaactgctggatattagctggcttatcgaaagcatgaaagttggtaaaccggtggacaccaaggggaaataccagttggcggaatcggttgaggtgagtgcgaacccagatccgacagaaggtcgtgtaaacgagctgcctcctactatgaaaaccgtttcgccgtatgcgtgtcaacgccgcaccaccctgaacaaccgtaatcaacgttttacggactcgctggagattcttcgtgaaaactacgagctgaaaggcaacgacgatactgcgctggagatccgtcgtgctatctccgtgctgaaaagccttccgtttgaggtacgtagcctgaaagacacggaaggattgccctggatcagtgatgaagtcaaagggattatggaagaaatcatcgaagtcggggagtcgcgtgaagtgcaggccgtgctcaatgatgagtggtatcaaagcttccacgcatttacgcgtgtctttggagtgggggtgaagacagcagacaagtggtaccgtatgggtctgcgcaccctcgaggatgttcgttccagcaagaccctgaagttgaccccgtggcagaaagtaggtctgctgtattatgaagatcttgctcgcggcgttacgcgtgccgaagctgacgcgatttggctgctggttgcggatgcagtcgcaactttcgacccggatgcgatcgtggagattgtcggtggatttcgtcgtgggaaacctcagggtcacgacgttgatctgcttatcagttctccgggagctgaaaaagagcaagaagaccaactcctgcagaaagtgatgaatctgtggaagaaacaagggttgttgctgtgtggtcgtctggaatggagtcagtgggaatgggggggttcgccttccggtaaggctgatgagggtgacgcggaggcgtcgtgctttctgatcctcaaactttatgatcatctggtggtaaaaagtaaacgcaatatgccgactggttcgaacatgggcgagtccaaaccgtggaaagcaattaaagtagatctgctgcgttgcccccgcggcagttttgcgtttgcgatgttgcagtggaccggaagccgcatgttccgtcgtgatctgcgctggtacgccctggaagagaagaacatgatgctggacaatcattcgctgtatgacatgactcgtggtatccaactccctgctaaatcggaagaggaaattttcgaacatctggggcttgaatacctggaaccgttcgaacgtaacgca

SEQ ID NO: 4566 - protein, 528 aa, synthetic construct
  REGION 1..528: note = Variant of terminal deoxynucleotidyltransferase
MHHHHHGGSGSHGIRTIDSDFGKKQQKKGDNHDSSATYEIKFHEFVLFILEEKMGATRRTFLTDLARKKGFRVENELTDEVTHIVAENLSRSEVLAWLKEHKMEKTKQFELLDISWLIESMKVGKPVDTKGKYQLAESVEVSANPDPTEGRVNELPPTMKTVSPYACQRRTTLNNRNQRFTDSLEILRENYELKGNDDTALEIRRAISVLKSLPFEVRSLKDTEGLPWISDEVKGIMEEIIEVGESREVQAVLNDEWYQSFHAFTRVFGVGVKTADKWYRMGLRTLEDVRSSKTLKLTPWQKVGLLYYEDLARGVTRAEADAIWLLVADAVATFDPDAIVEIVGGFRRGKPQGHDVDLLISSPGAEKEQEDQLLQKVMNLWKKQGLLLCGRLEWSQWEWGGSPSGKADEGDAEASCFLILKLYDHLVVKSKRNMPTGSNMGESKPWKAIKVDLLRCPRGSFAFAMLQWTGSRMFRRDLRWYALEEKNMMLDNHSLYDMTRGIQLPAKSEEEIFEHLGLEYLEPFERNA

SEQ ID NO: 4567 - DNA, 1584 bp, synthetic construct
  misc_feature 1..1584: note = Variant of terminal deoxynucleotidyltransferase
  source 1..1584: mol_type = other DNA
atgcaccatcatcatcatggcggtagcggcagccacggcattcgtaccatcgattcggacttcgggaagaaacagcagaaaaaaggcgataaccacgatagttccgccacttatgaaatcaaatttcacgagtttgtgctgttcattctcgaagaaaaaatgggtgcgacgcgtcgtacttttctgacagatttagcccgcaagaaagggttccgcgtcgagaatgaactgaccgacgaagttacccacatcgtggcagaaaatctgtcacgctctgaagtattggcttggctgaaagaacacaagatggagaagaccaagcaattcgaactgctggatattagctggcttatcgaaagcatgaaagttggtaaaccggtggacaccaaggggaaataccagttggcggaatcggttgaggtgagtgcgaacccagatccgacagaaggtcgtgtaaacgagctgcctcctactatgaaaaccgtttctccgtatgcgtgtcaacgccgcaccagcctgatgaaccgtaataagcgttttacggactcgctggagattcttcgtgaaaattacgagctgaaaggcaatgacgatactgcgctggaatttcgtcgtgctatctccgtgctgaaaagccttccgtttgaggtacgtagcctgaaagacacggaaggattgccctggatcagtgatgaagtcaaagggattatggaagaaatcatcgaagtcggggagtcgcgtgaagtgcaggccgtgctcaatgatgagtggtatcaaagcttccacgcatttacgcgtgtctttggagtgggggtgaagacagcagacaagtggtaccgtatgggtctgcgcaccctcgaggatgttcgttccagcaaaactctgaagttgaccccgtggcagaaagtaggtctgctgtattatgaagatcttgctcgcggcgttacgcgtgccgaagctgacgcgatttggctgctggttcaggatgcagtcgcaacttttgacccagatgcgatctgcgagattgtcggtggatttcgtcgtgggaaacctcagggtcacgacgttgatctgcttatcagttctccgggagctgaaaaagagcaagaggaccaactcctgcagaaagtgatgaatctgtggaagaaacaagggttgttgctgtgtggtcgtctggaatggagtcagtgggaatgggggggttcgccttccggtaaggctgatgagggtgacgcggaggcgtcgtgctttctgatcctcaaactttatgatcatctggtgcgtaaaagtaaacgcaatatgccgactggttcgaacatgggcgagtccaaaccgtggaaagcaattaaagtagatctgctgcgttgcccccgtgggagttttgcgtttgcgatgttgcagtggaccggaagccgcatgttccgtcgtgatctgcgctggtacgccctggaagagaagaacatgatgctggacaatcattcgctgtatgacatgactcgtggtatccaactccctgctaaatcggaagaggaaattttcgaacatctggggcttgaatacctggaaccgttcgaacgtaacgca

SEQ ID NO: 4568 - protein, 528 aa, synthetic construct
  REGION 1..528: note = Variant of terminal deoxynucleotidyltransferase
MHHHHHGGSGSHGIRTIDSDFGKKQQKKGDNHDSSATYEIKFHEFVLFILEEKMGATRRTFLTDLARKKGFRVENELTDEVTHIVAENLSRSEVLAWLKEHKMEKTKQFELLDISWLIESMKVGKPVDTKGKYQLAESVEVSANPDPTEGRVNELPPTMKTVSPYACQRRTSLMNRNKRFTDSLEILRENYELKGNDDTALEFRRAISVLKSLPFEVRSLKDTEGLPWISDEVKGIMEEIIEVGESREVQAVLNDEWYQSFHAFTRVFGVGVKTADKWYRMGLRTLEDVRSSKTLKLTPWQKVGLLYYEDLARGVTRAEADAIWLLVQDAVATFDPDAICEIVGGFRRGKPQGHDVDLLISSPGAEKEQEDQLLQKVMNLWKKQGLLLCGRLEWSQWEWGGSPSGKADEGDAEASCFLILKLYDHLVRKSKRNMPTGSNMGESKPWKAIKVDLLRCPRGSFAFAMLQWTGSRMFRRDLRWYALEEKNMMLDNHSLYDMTRGIQLPAKSEEEIFEHLGLEYLEPFERNA

SEQ ID NO: 4569 - DNA, 1584 bp, synthetic construct
  misc_feature 1..1584: note = Variant of terminal deoxynucleotidyltransferase
  source 1..1584: mol_type = other DNA
atgcaccatcatcatcatggcggtagcggcagccacggcattcgtaccatcgattcggacttcgggaagaaacagcagaaaaaaggcgataaccacgatagttccgccacttatgaaatcaaatttcacgagtttgtgctgttcattctcgaagaaaaaatgggtgcgacgcgtcgtacttttctgacagatttagcccgcaagaaagggttccgcgtcgagaatgaactgaccgacgaagttacccacatcgtggcagaaaatctgtcacgctctgaagtaatggcttggctgaaagaacacaagatggagaagaccaagcaattcgaactgctggatattagctggcttatcgaaagcatgaaagttggtaaaccggtggacaccaaggggaaataccagttggcggaatcggttgaggtgagtgcgaacccagatccgacagaaggtcgtgtaaacgagctgcctcctactatgaaaaccgtttctccgtatgcgtgtcaacgccgcaccaccctgaacaaccgtaatcaacgttttacggactcgctggagattcttcgtgaaaattacgagctgaaaggcaacgacgatactgcgctggaatttcgtcgtgctatctccgtgctgaaaagccttccgtttgaggtacgtagcctgaaagacacggaaggattgccctggatcagtgatgaagtcaaagggattatggaagaaatcatcgaagtcggggagtcgcgtgaagtgcaggccgtgctcaatgatgagtggtatcaaagcttccacgcatttacgcgtgtctttggagtgggggtgaagacagcagacaagtggtaccgtatgggtctgcgcaccctcgaggatgttcgttccagcaagaccctgaagttgaccccgtggcagaaagtaggtctgctgtattatgaagatcttgctcgcggcgttacgcgtgccgaagctgacgcgatttggctgctggttcaggatgcagtcgcaactttcgacccggatgcgatcgtggagattgtcggtggatttcgtcgtgggaaacctcagggtcacgacgttgatctgcttatcagttctccgggagctgaaaaagagcaagaagaccaactcctgcagaaagtgatgaatctgtggaagaaacaagggttgttgctgtgtggtcgtctggaatggagtcagtgggaatgggggggttcgccttccggtaaggctgatgagggtgacgcggaggcgtcgtgctttctgatcctcaaactttatgatcatctggtggtaaaaagtaaacgcaatatgccgactggttcgaacatgggcgagtccaaaccgtggaaagcaattaaagtagatctgctgcgttgcccccgcggcagttttgcgtttgcgatgttgcagtggaccggaagccgcatgttccgtcgtgatctgcgcgattacgccctggaagagaagaacatgatgctggacaatcattcgctgtatgacatgactcgtggtatccaactccctgctaaatcggaagaggaaattttcgaacatctggggcttgaatacctggaaccgttcgaacgtaacgca

SEQ ID NO: 4570 - protein, 528 aa, synthetic construct
  REGION 1..528: note = Variant of terminal deoxynucleotidyltransferase
MHHHHHGGSGSHGIRTIDSDFGKKQQKKGDNHDSSATYEIKFHEFVLFILEEKMGATRRTFLTDLARKKGFRVENELTDEVTHIVAENLSRSEVMAWLKEHKMEKTKQFELLDISWLIESMKVGKPVDTKGKYQLAESVEVSANPDPTEGRVNELPPTMKTVSPYACQRRTTLNNRNQRFTDSLEILRENYELKGNDDTALEFRRAISVLKSLPFEVRSLKDTEGLPWISDEVKGIMEEIIEVGESREVQAVLNDEWYQSFHAFTRVFGVGVKTADKWYRMGLRTLEDVRSSKTLKLTPWQKVGLLYYEDLARGVTRAEADAIWLLVQDAVATFDPDAIVEIVGGFRRGKPQGHDVDLLISSPGAEKEQEDQLLQKVMNLWKKQGLLLCGRLEWSQWEWGGSPSGKADEGDAEASCFLILKLYDHLVVKSKRNMPTGSNMGESKPWKAIKVDLLRCPRGSFAFAMLQWTGSRMFRRDLRDYALEEKNMMLDNHSLYDMTRGIQLPAKSEEEIFEHLGLEYLEPFERNA

SEQ ID NO: 4571 - DNA, 1584 bp, synthetic construct
  misc_feature 1..1584: note = Variant of terminal deoxynucleotidyltransferase
  source 1..1584: mol_type = other DNA
atgcaccatcatcatcatggcggtagcggcagccacggcattcgtaccatcgattcggacttcgggaagaaacagcagaaaaaaggcgataaccacgatagttccgccacttatgaaatcaaatttcacgagtttgtgctgttcattctcgaagaaaaaatgggtgcgacgcgtcgtacttttctgacagatttagcccgcaagaaagggttccgcgtcgagaatgaactgaccgacgaagttacccacatcgtggcagaaaatctgtcacgctctgaagtattggcttggctgaaagaacacaagatggagaagaccaagcaattcgaactgctggatattagctggcttatcgaaagcatgaaagttggtaaaccggtggacaccaaggggaaataccagttggcggaatcggttgaggtgagtgcgaacccagatccgacagaaggtcgtgtaaacgagctgcctcctactatgaaaaccgtttctccgtatgcgtgtcaacgccgcaccaccctgaacaaccgtaatcaacgttttacggactcgctggagattcttcgtgaaaattacgagctgaaaggcaacgacgatactgcgctggagatccgtcgtgctatctccgtgctgaaaagccttccgtttgaggtacgtagcctgaaagacacggaaggattgccctggatcagtgatgaagtcaaagggattatggaagaaatcatcgaagtcggggagtcgcgtgaagtgcaggccgtgctcaatgatgagtggtatcaaagcttccacgcatttacgcgtgtctttggagtgggggtgaagacagcagacaagtggtaccgtatgggtctgcgcaccctcgaggatgttcgttccagcaagaccctgaagttgaccccgtggcagaaagtaggtctgctgtattatgaagatcttgctcgcggcgttacgcgtgccgaagctgacgcgatttggctgctggttgcggatgcagtcgcaactttcgacccggatgcgatcgtggagattgtcggtggatttcgtcgtgggaaacctcagggtcacgacgttgatctgcttatcagttctccgggagctgaaaaagagcaagaagaccaactcctgcagaaagtgatgaatctgtggaagaaacaagggttgttgctgtgtggtcgtctggaatggagtcagtgggaatgggggggttcgccttccggtaaggctgatgagggtgacgcggaggcgtcgtgctttctgatcctcaaactttatgatcatctggtgcgcaaaagtaaacgcaatatgccgactggttcgaacatgggcgagtccaaaccgtggaaagcaattaaagtagatctgctgcgttgcccccgcggcagttttgcgtttgcgatgttgcagtggaccggaagccgcatgttccgtcgtgatctgcgcgattacgccctggaacagaagaacatgatgctggacaatcattcgctgtatgacatgactcgtggtatccaactccctgctaaatcggaagaggaaattttcgaacatctggggcttgaatacctggaaccgttcgaacgtaacgca

SEQ ID NO: 4572 - protein, 528 aa, synthetic construct
  REGION 1..528: note = Variant of terminal deoxynucleotidyltransferase
MHHHHHGGSGSHGIRTIDSDFGKKQQKKGDNHDSSATYEIKFHEFVLFILEEKMGATRRTFLTDLARKKGFRVENELTDEVTHIVAENLSRSEVLAWLKEHKMEKTKQFELLDISWLIESMKVGKPVDTKGKYQLAESVEVSANPDPTEGRVNELPPTMKTVSPYACQRRTTLNNRNQRFTDSLEILRENYELKGNDDTALEIRRAISVLKSLPFEVRSLKDTEGLPWISDEVKGIMEEIIEVGESREVQAVLNDEWYQSFHAFTRVFGVGVKTADKWYRMGLRTLEDVRSSKTLKLTPWQKVGLLYYEDLARGVTRAEADAIWLLVADAVATFDPDAIVEIVGGFRRGKPQGHDVDLLISSPGAEKEQEDQLLQKVMNLWKKQGLLLCGRLEWSQWEWGGSPSGKADEGDAEASCFLILKLYDHLVRKSKRNMPTGSNMGESKPWKAIKVDLLRCPRGSFAFAMLQWTGSRMFRRDLRDYALEQKNMMLDNHSLYDMTRGIQLPAKSEEEIFEHLGLEYLEPFERNA

SEQ ID NO: 4573 - DNA, 1584 bp, synthetic construct
  misc_feature 1..1584: note = Variant of terminal deoxynucleotidyltransferase
  source 1..1584: mol_type = other DNA
atgcaccatcatcatcatggcggtagcggcagccacggcattcgtaccatcgattcggacttcgggaagaaacagcagaaaaaaggcgataaccacgatagttccgccacttatgaaatcaaatttcacgagtttgtgctgttcattctcgaagaaaaaatgggtgcgacgcgtcgtacttttctgacagatttagcccgcaagaaagggttccgcgtcgagaatgaactgaccgacgaagttacccacatcgtggcagaaaatctgtcacgctctgaagtattggcttggctgaaagaacacaagatggagaagaccaagcaattcgaactgctggatattagctggcttatcgaaagcatgaaagttggtaaaccggtggacaccaaggggaaataccagttggcggaatcggttgaggtgagtgcgaacccagatccgacagaaggtcgtgtaaacgagctgcctcctactatgaaaaccgtttctccgtatgcgtgtcaacgccgcaccaccctgaacaaccgtaatcaacgttttacggactcgctggagattcttcgtgaaaactacgagctgaaaggcaacgacgatactgcgctggaatttcgtcgtgctatctccgtgctgaaaagccttccgtttgaggtacgtagcctgaaagacacggaaggattgccctggatcagtgatgaagtcaaagggattatggaagaaatcatcgaagtcggggagtcgcgtgaagtgcaggccgtgctcaatgatgagtggtatcaaagcttccacgcatttacgcgtgtctttggagtgggggtgaagacagcagacaagtggtaccgtatgggtctgcgcaccctcgaggatgttcgttccagcaagaccctgaagttgaccccgtggcagaaagtaggtctgctgtattatgaagatcttgctcgcggcgttacgcgtgccgaagctgacgcgatttggctgctggttcaggatgcagtcgcaactttcgacccggatgcgatcgtggagattgtcggtggatttcgtcgtgggaaacctcagggtcacgacgttgatctgcttatcagttctccgggagctgaaaaagagcaagaagaccaactcctgcagaaagtgatgaatctgtggaagaaacaagggttgttgctgtgtggtcgtctggaatggagtcagtgggaatgggggggttcgccttccggtaaggctgatgagggtgacgcggaggcgtcgtgctttctgatcctcaaactttatgatcatctggtgcgcaaaagtaaacgcaatatgccgactggttcgaacatgggcgagtccaaaccgtggaaagcaattaaagtagatctgctgcgttgcccccgcggcagttttgcgtttgcgatgttgcagtggaccggaagccgcatgttccgtcgtgatctgcgcgattacgcccgcgaagagaagaacatgatgctggacaatcattcgctgtatgacatgactcgtggtatccaactccctgctaaatcggaagaggaaattttcgaacatctggggcttgaatacctggaaccgttcgaacgtaacgca

SEQ ID NO: 4574 - protein, 528 aa, synthetic construct
  REGION 1..528: note = Variant of terminal deoxynucleotidyltransferase
MHHHHHGGSGSHGIRTIDSDFGKKQQKKGDNHDSSATYEIKFHEFVLFILEEKMGATRRTFLTDLARKKGFRVENELTDEVTHIVAENLSRSEVLAWLKEHKMEKTKQFELLDISWLIESMKVGKPVDTKGKYQLAESVEVSANPDPTEGRVNELPPTMKTVSPYACQRRTTLNNRNQRFTDSLEILRENYELKGNDDTALEFRRAISVLKSLPFEVRSLKDTEGLPWISDEVKGIMEEIIEVGESREVQAVLNDEWYQSFHAFTRVFGVGVKTADKWYRMGLRTLEDVRSSKTLKLTPWQKVGLLYYEDLARGVTRAEADAIWLLVQDAVATFDPDAIVEIVGGFRRGKPQGHDVDLLISSPGAEKEQEDQLLQKVMNLWKKQGLLLCGRLEWSQWEWGGSPSGKADEGDAEASCFLILKLYDHLVRKSKRNMPTGSNMGESKPWKAIKVDLLRCPRGSFAFAMLQWTGSRMFRRDLRDYAREEKNMMLDNHSLYDMTRGIQLPAKSEEEIFEHLGLEYLEPFERNA

SEQ ID NO: 4575 - DNA, 1584 bp, synthetic construct
  misc_feature 1..1584: note = Variant of terminal deoxynucleotidyltransferase
  source 1..1584: mol_type = other DNA
atgcaccatcatcatcatggcggtagcggcagccacggcattcgtaccatcgattcggacttcgggaagaaacagcagaaaaaaggcgataaccacgatagttccgccacttatgaaatcaaatttcacgagtttgtgctgttcattctcgaagaaaaaatgggtgcgacgcgtcgtacttttctgacagatttagcccgcaagaaagggttccgcgtcgagaatgaactgaccgacgaagttacccacatcgtggcagaaaatctgtcacgctctgaagtattggcttggctgaaagaacacaagatggagaagaccaagcaattcgaactgctggatattagctggcttatcgaaagcatgaaagttggtaaaccggtggacaccaaggggaaataccagttggcggaatcggttgaggtgagtgcgaacccagatccgacagaaggtcgtgtaaacgagctgcctcctactatgaaaaccgtttcgccgtatgcgtgtcaacgccgcaccaccctgaacaaccgtaatcaacgttttacggactcgctggagattcttcgtgaaaattacgagctgaaaggcaacgacgatactgcgctggaatttcgtcgtgctatctccgtgctgaaaagccttccgtttgaggtacgtagcctgaaagacacggaaggattgccctggatcagtgatgaagtcaaagggattatggaagaaatcatcgaagtcggggagtcgcgtgaagtgcaggccgtgctcaatgatgagtggtatcaaagcttccacgcatttacgcgtgtctttggagtgggggtgaagacagcagacaagtggtaccgtatgggtctgcgcaccctcgaggatgttcgttccagcaagaccctgaagttgaccccgtggcagaaagtaggtctgctgtattatgaagatcttgctcgcggcgttacgcgtgccgaagctgacgcgatttggctgctggttctggatgcagtcgcaactttcgacccggatgcgatcgtggagattgtcggtggatttcgtcgtgggaaacctcagggtcacgacgttgatctgcttatcagttctccgggagctgaaaaagagcaagaagaccaactcctgcagaaagtgatgaatctgtggaagaaacaagggttgttgctgtgtggtcgtctggaatggagtcagtgggaatgggggggttcgccttccggtaaggctgatgagggtgacgcggaggcgtcgtgctttctgatcctcaaactttatgatcatctggtgcgcaaaagtaaacgcaatatgccgactggttcgaacatgggcgagtccaaaccgtggaaagcaattaaagtagatctgctgcgttgcccccgcggcagttttgcgtttgcgatgttgcagtggaccggaagccgcatgttccgtcgtgatctgcgcgattacgcccgcgaagagaagaacatgatgctggacaatcattcgctgtatgacatgactcgtggtatccaactccctgctaaatcggaagaggaaattttcgaacatctggggcttgaatacctggaaccgttcgaacgtaacgca

SEQ ID NO: 4576 - protein, 528 aa, synthetic construct
  REGION 1..528: note = Variant of terminal deoxynucleotidyltransferase
MHHHHHGGSGSHGIRTIDSDFGKKQQKKGDNHDSSATYEIKFHEFVLFILEEKMGATRRTFLTDLARKKGFRVENELTDEVTHIVAENLSRSEVLAWLKEHKMEKTKQFELLDISWLIESMKVGKPVDTKGKYQLAESVEVSANPDPTEGRVNELPPTMKTVSPYACQRRTTLNNRNQRFTDSLEILRENYELKGNDDTALEFRRAISVLKSLPFEVRSLKDTEGLPWISDEVKGIMEEIIEVGESREVQAVLNDEWYQSFHAFTRVFGVGVKTADKWYRMGLRTLEDVRSSKTLKLTPWQKVGLLYYEDLARGVTRAEADAIWLLVLDAVATFDPDAIVEIVGGFRRGKPQGHDVDLLISSPGAEKEQEDQLLQKVMNLWKKQGLLLCGRLEWSQWEWGGSPSGKADEGDAEASCFLILKLYDHLVRKSKRNMPTGSNMGESKPWKAIKVDLLRCPRGSFAFAMLQWTGSRMFRRDLRDYAREEKNMMLDNHSLYDMTRGIQLPAKSEEEIFEHLGLEYLEPFERNA

SEQ ID NO: 4577 - DNA, 1584 bp, synthetic construct
  misc_feature 1..1584: note = Variant of terminal deoxynucleotidyltransferase
  source 1..1584: mol_type = other DNA
atgcaccatcatcatcatggcggtagcggcagccacggcattcgtaccatcgattcggacttcgggaagaaacagcagaaaaaaggcgataaccacgatagttccgccacttatgaaatcaaatttcacgagtttgtgctgttcattctcgaagaaaaaatgggtgcgacgcgtcgtacttttctgacagatttagcccgcaagaaagggttccgcgtcgagaatgaactgaccgacgaagttacccacatcgtggcagaaaatctgtcacgctctgaagtattggcttggctgaaagaacacaagatggagaagaccaagcaattcgaactgctggatattagctggcttatcgaaagcatgaaagttggtaaaccggtggacaccaaggggaaataccagttggcggaatcggttgaggtgagtgcgaacccagatccgacagaaggtcgtgtaaacgagctgcctcctactatgaaaaccgtttctccgtatgcgtgtcaacgccgcaccaccctgaacaaccgtaatcaacgttttacggactcgctggagattcttcgtgaaaactacgagctgaaaggcaacgacgatactgcgctggagttccgtcgtgctatctccgtgctgaaaagccttccgtttgaggtacgtagcctgaaagacacggaaggattgccctggatcagtgatgaagtcaaagggattatggaagaaatcatcgaagtcggggagtcgcgtgaagtgcaggccgtgctcaatgatgagtggtatcaaagcttccacgcatttacgcgtgtctttggagtgggggtgaagacagcagacaagtggtaccgtatgggtctgcgcaccctcgaggatgttcgttccagcaagaccctgaagttgaccccgtggcagaaagtaggtctgctgtattatgaagatcttgctcgcggcgttacgcgtgccgaagctgacgcgatttggctgctggttcaggatgcagtcgcaactttcgacccggatgcgatcgtggagattgtcggtggatttcgtcgtgggaaacctcagggtcacgacgttgatctgcttatcagtacgcgtggagctagtaaagagcaagaagaccaactcctgcagaaagtgatgaatctgtggaagaaacaagggttgttgctgtgtggtcgtctggaatggagtcagtgggaatgggggggttcgccttccggtaaggctgatgagggtgacgcggaggcgtcgtgctttctgatcctcaaactttatgatcatctggtggtaaaaagtaaacgcaatatgccgactggttcgaacatgggcgagtccaaaccgtggaaagcaattaaagtagatctgctgcgttgcccccgcggcagttttgcgtttgcgatgttgcagtggaccggaagccgcatgttccgtcgtgatctgcgcgattacgcccgcgaagagaagaacatgatgctggacaatcattcgctgtatgaccctagtcgtggtatcggtctccctgctaaatcggaagaggaaattttcgaacatctggggcttgaatacctggaaccgttcgaacgtaacgca

SEQ ID NO: 4578 - protein, 528 aa, synthetic construct
  REGION 1..528: note = Variant of terminal deoxynucleotidyltransferase
MHHHHHGGSGSHGIRTIDSDFGKKQQKKGDNHDSSATYEIKFHEFVLFILEEKMGATRRTFLTDLARKKGFRVENELTDEVTHIVAENLSRSEVLAWLKEHKMEKTKQFELLDISWLIESMKVGKPVDTKGKYQLAESVEVSANPDPTEGRVNELPPTMKTVSPYACQRRTTLNNRNQRFTDSLEILRENYELKGNDDTALEFRRAISVLKSLPFEVRSLKDTEGLPWISDEVKGIMEEIIEVGESREVQAVLNDEWYQSFHAFTRVFGVGVKTADKWYRMGLRTLEDVRSSKTLKLTPWQKVGLLYYEDLARGVTRAEADAIWLLVQDAVATFDPDAIVEIVGGFRRGKPQGHDVDLLISTRGASKEQEDQLLQKVMNLWKKQGLLLCGRLEWSQWEWGGSPSGKADEGDAEASCFLILKLYDHLVVKSKRNMPTGSNMGESKPWKAIKVDLLRCPRGSFAFAMLQWTGSRMFRRDLRDYAREEKNMMLDNHSLYDPSRGIGLPAKSEEEIFEHLGLEYLEPFERNA

SEQ ID NO: 4579 - DNA, 1584 bp, synthetic construct
  misc_feature 1..1584: note = Variant of terminal deoxynucleotidyltransferase
  source 1..1584: mol_type = other DNA
atgcaccatcatcatcatggcggtagcggcagccacggcattcgtaccatcgattcggacttcgggaagaaacagcagaaaaaaggcgataaccacgatagttccgccacttatgaaatcaaatttcacgagtttgtgctgttcattctcgaagaaaaaatgggtgcgacgcgtcgtacttttctgacagatttagcccgcaagaaagggttccgcgtcgagaatgaactgaccgacgaagttacccacatcgtggcagaaaatctgtcacgctctgaagtattggcttggctgaaagaacacaagatggagaagaccaagcaattcgaactgctggatattagctggcttatcgaaagcatgaaagttggtaaaccggtggacaccaaggggaaataccagttggcggaatcggttgaggtgagtgcgaacccagatccgacagaaggtcgtgtaaacgagctgcctcctactatgaaaaccgtttcgccgtatgcgtgtcaacgccgcaccaccctgaacaaccgtaatcaacgttttacggactcgctggagattcttcgtgaaaattacgagctgaaaggcaacgacgatactgcgctggagatccgtcgtgctatctccgtgctgaaaagccttccgtttgaggtacgtagcctgaaagacacggaaggattgccctggatcagtgatgaagtcaaagggattatggaagaaatcatcgaagtcggggagtcgcgtgaagtgcaggccgtgctcaatgatgagtggtatcaaagcttccacgcatttacgcgtgtctttggagtgggggtgaagacagcagacaagtggtaccgtatgggtctgcgcaccctcgaggatgttcgttccagcaagaccctgaagttgaccccgtggcagaaagtaggtctgctgtattatgaagatcttgctcgcggcgttacgcgtgccgaagctgacgcgatttggctgctggttgcggatgcagtcgcaactttcgacccggatgcgatcgtggagattgtcggtggatttcgtcgtgggaaacctcagggtcacgacgttgatctgcttatcagttcgggtggagctgaaaaagagcaagaagaccaactcctgcagaaagtgatgaatctgtggaagaaacaagggttgttgctgtgtggtcgtctggaatggagtcagtgggaatgggggggttcgccttccggtaaggctgatgagggtgacgcggaggcgtcgtgctttctgatcctcaaactttatgatcatctggtggtaaaaagtaaacgcaatatgccgactggttcgaacatgggcgagtccaaaccgtggaaagcaattaaagtagatctgctgcgttgcccccgcggcagttttgcgtttgcgatgttgcagtggaccggaagccgcatgttccgtcgtgatctgcgctggtacgcccgcgaagagaagaacatgatgctggacaatcattcgctgtatgacatgactcgtggtatccaactccctgctaaatcggaagaggaaattttcgaacatctggggcttgaatacctggaaccgttcgaacgtaacgca

SEQ ID NO: 4580 - protein, 528 aa, synthetic construct
  REGION 1..528: note = Variant of terminal deoxynucleotidyltransferase
MHHHHHGGSGSHGIRTIDSDFGKKQQKKGDNHDSSATYEIKFHEFVLFILEEKMGATRRTFLTDLARKKGFRVENELTDEVTHIVAENLSRSEVLAWLKEHKMEKTKQFELLDISWLIESMKVGKPVDTKGKYQLAESVEVSANPDPTEGRVNELPPTMKTVSPYACQRRTTLNNRNQRFTDSLEILRENYELKGNDDTALEIRRAISVLKSLPFEVRSLKDTEGLPWISDEVKGIMEEIIEVGESREVQAVLNDEWYQSFHAFTRVFGVGVKTADKWYRMGLRTLEDVRSSKTLKLTPWQKVGLLYYEDLARGVTRAEADAIWLLVADAVATFDPDAIVEIVGGFRRGKPQGHDVDLLISSGGAEKEQEDQLLQKVMNLWKKQGLLLCGRLEWSQWEWGGSPSGKADEGDAEASCFLILKLYDHLVVKSKRNMPTGSNMGESKPWKAIKVDLLRCPRGSFAFAMLQWTGSRMFRRDLRWYAREEKNMMLDNHSLYDMTRGIQLPAKSEEEIFEHLGLEYLEPFERNA

SEQ ID NO: 4581 - DNA, 1584 bp, synthetic construct
  misc_feature 1..1584: note = Variant of terminal deoxynucleotidyltransferase
  source 1..1584: mol_type = other DNA
atgcaccatcatcatcatggcggtagcggcagccacggcattcgtaccatcgattcggacttcgggaagaaacagcagaaaaaaggcgataaccacgatagttccgccacttatgaaatcaaatttcacgagtttgtgctgttcattctcgaagaaaaaatgggtgcgacgcgtcgtacttttctgacagatttagcccgcaagaaagggttccgcgtcgagaatgaactgaccgacgaagttacccacatcgtggcagaaaatctgtcacgctctgaagtattggcttggctgaaagaacacaagatggagaagaccaagcaattcgaactgctggatattagctggcttatcgaaagcatgaaagttggtaaaccggtggacaccaaggggaaataccagttggcggaatcggttgaggtgagtgcgaacccagatccgacagaaggtcgtgtaaacgagctgcctcctactatgaaaaccgtttcgccgtatgcgtgtcaacgccgcaccaccctgaacaaccgtaatcaacgttttacggactcgctggagattcttcgtgaaaactacgagctgaaaggcaacgacgatactgcgctgcgcatccgtcgtgctatctccgtgctgaaaagccttccgtttgaggtacgtagcctgaaagacacggaaggattgccctggatcagtgatgaagtcaaagggattatggaagaaatcatcgaagtcggggagtcgcgtgaagtgcaggccgtgctcaatgatgagtggtatcaaagcttccacgcatttacgcgtgtctttggagtgggggtgaagacagcagacaagtggtaccgtatgggtctgcgcaccctcgaggatgttcgttccagcaagaccctgaagttgaccccgtggcagaaagtaggtctgctgtattatgaagatcttgctcgcggcgttacgcgtgccgaagctgacgcgatttggctgctggttgcggatgcagtcgcaactttcgacccggatgcgatcgtggagattgtcggtggatttcgtcgtgggaaacctcagggtcacgacgttgatctgcttatcagtacgggtggagctagtaaagagcaagaagaccaactcctgcagaaagtgatgaatctgtggaagaaacaagggttgttgctgtgtggtcgtctggaatggagtcagtgggaatgggggggttcgccttccggtaaggctgatgagggtgacgcggaggcgtcgtgctttctgatcctcaaactttatgatcatctggtggtaaaaagtaaacgcaatatgccgactggttcgaacatgggcgagtccaaaccgtggaaagcaattaaagtagatctgctgcgttgcccccgcggcagttttgcgtttgcgatgttgcagtggaccggaagccgcatgttccgtcgtgatctgcgcgattacgccctggaacagaagaacatgatgctggacaatcattcgctgtatgaccctagtcgtggtatcggtctccctgctaaatcggaagaggaaattttcgaacatctggggcttgaatacctggaaccgttcgaacgtaacgca

SEQ ID NO: 4582 - protein, 528 aa, synthetic construct
  REGION 1..528: note = Variant of terminal deoxynucleotidyltransferase
MHHHHHGGSGSHGIRTIDSDFGKKQQKKGDNHDSSATYEIKFHEFVLFILEEKMGATRRTFLTDLARKKGFRVENELTDEVTHIVAENLSRSEVLAWLKEHKMEKTKQFELLDISWLIESMKVGKPVDTKGKYQLAESVEVSANPDPTEGRVNELPPTMKTVSPYACQRRTTLNNRNQRFTDSLEILRENYELKGNDDTALRIRRAISVLKSLPFEVRSLKDTEGLPWISDEVKGIMEEIIEVGESREVQAVLNDEWYQSFHAFTRVFGVGVKTADKWYRMGLRTLEDVRSSKTLKLTPWQKVGLLYYEDLARGVTRAEADAIWLLVADAVATFDPDAIVEIVGGFRRGKPQGHDVDLLISTGGASKEQEDQLLQKVMNLWKKQGLLLCGRLEWSQWEWGGSPSGKADEGDAEASCFLILKLYDHLVVKSKRNMPTGSNMGESKPWKAIKVDLLRCPRGSFAFAMLQWTGSRMFRRDLRDYALEQKNMMLDNHSLYDPSRGIGLPAKSEEEIFEHLGLEYLEPFERNA

SEQ ID NO: 4583 - DNA, 1584 bp, synthetic construct
  misc_feature 1..1584: note = Variant of terminal deoxynucleotidyltransferase
  source 1..1584: mol_type = other DNA
atgcaccatcatcatcatggcggtagcggcagccacggcattcgtaccatcgattcggacttcgggaagaaacagcagaaaaaaggcgataaccacgatagttccgccacttatgaaatcaaatttcacgagtttgtgctgttcattctcgaagaaaaaatgggtgcgacgcgtcgtacttttctgacagatttagcccgcaagaaagggttccgcgtcgagaatgaactgaccgacgaagttacccacatcgtggcagaaaatctgtcacgctctgaagtattggcttggctgaaagaacacaagatggagaagaccaagcaattcgaactgctggatattagctggcttatcgaaagcatgaaagttggtaaaccggtggacaccaaggggaaataccagttggcggaatcggttgaggtgagtgcgaacccagatccgacagaaggtcgtgtaaacgagctgcctcctactatgaaaaccgtttctccgtatgcgtgtcaacgccgcaccaccctgaacaaccgtaataagcgttttacggactcgctggagattcttcgtgaaaattacgagctgaaaggcaatgacgatactgcgctggaatttcgtcgtgctatctccgtgctgaaaagccttccgtttgaggtacgtagcctgaaagacacggaaggattgccctggatcagtgatgaagtcaaagggattatggaagaaatcatcgaagtcggggagtcgcgtgaagtgcaggccgtgctcaatgatgagtggtatcaaagcttccacgcatttacgcgtgtctttggagtgggggtgaagacagcagacaagtggtaccgtatgggtctgcgcaccctcgaggatgttcgttccagcaaaactctgaagttgaccccgtggcagaaagtaggtctgctgtattatgaagatcttgctcgcggcgttacgcgtgccgaagctgacgcgatttggctgctggttcaggatgcagtcgcaactttcgacccggatgcgatcgttgagattgtcggtggatttcgtcgtgggaaacctcagggtcacgacgttgatctgcttatcagttctccgggagctgaaaaagagcaagaagaccaactcctgcagaaagtgatgaatctgtggaagaaacaagggttgttgctgtgtggtcgtctggaatggagtcagtgggaatgggggggttcgccttccggtaaggctgatgagggtgacgcggaggcgtcgtgctttctgatcctcaaactttatgatcatctggtgcgtaaaagtaaacgcaatatgccgactggttcgaacatgggcgagtccaaaccgtggaaagcaattaaagtagatctgctgcgttgcccccgcggcagttttgcgtttgcgatgttgcagtggaccggaagccgcatgttccgtcgtgatctgcgctggtacgccctggaagagaagaacatgatgctggacaatcattcgctgtatgacatgactcgtggtatccaactccctgctaaatcggaagaggaaattttcgaacatctggggcttgaatacctggaaccgttcgaacgtaacgca

SEQ ID NO: 4584 - protein, 528 aa, synthetic construct
  REGION 1..528: note = Variant of terminal deoxynucleotidyltransferase
MHHHHHGGSGSHGIRTIDSDFGKKQQKKGDNHDSSATYEIKFHEFVLFILEEKMGATRRTFLTDLARKKGFRVENELTDEVTHIVAENLSRSEVLAWLKEHKMEKTKQFELLDISWLIESMKVGKPVDTKGKYQLAESVEVSANPDPTEGRVNELPPTMKTVSPYACQRRTTLNNRNKRFTDSLEILRENYELKGNDDTALEFRRAISVLKSLPFEVRSLKDTEGLPWISDEVKGIMEEIIEVGESREVQAVLNDEWYQSFHAFTRVFGVGVKTADKWYRMGLRTLEDVRSSKTLKLTPWQKVGLLYYEDLARGVTRAEADAIWLLVQDAVATFDPDAIVEIVGGFRRGKPQGHDVDLLISSPGAEKEQEDQLLQKVMNLWKKQGLLLCGRLEWSQWEWGGSPSGKADEGDAEASCFLILKLYDHLVRKSKRNMPTGSNMGESKPWKAIKVDLLRCPRGSFAFAMLQWTGSRMFRRDLRWYALEEKNMMLDNHSLYDMTRGIQLPAKSEEEIFEHLGLEYLEPFERNA

SEQ ID NO: 4585 - DNA, 1584 bp, synthetic construct
  misc_feature 1..1584: note = Variant of terminal deoxynucleotidyltransferase
  source 1..1584: mol_type = other DNA
atgcaccatcatcatcatggcggtagcggcagccacggcattcgtaccatcgattcggacttcgggaagaaacagcagaaaaaaggcgataaccacgatagttccgccacttatgaaatcaaatttcacgagtttgtgctgttcattctcgaagaaaaaatgggtgcgacgcgtcgtacttttctgacagatttagcccgcaagaaagggttccgcgtcgagaatgaactgaccgacgaagttacccacatcgtggcagaaaatctgtcacgctctgaagtattggcttggctgaaagaacacaagatggagaagaccaagcaattcgaactgctggatattagctggcttatcgaaagcatgaaagttggtaaaccggtggacaccaaggggaaataccagttggcggaatcggttgaggtgagtgcgaacccagatccgacagaaggtcgtgtaaacgagctgcctcctactatgaaaaccgtttctccgtatgcgtgtcaacgccgcacctcgctgaacaaccgtaataagcgttttacggactcgctggagattcttcgtgaaatgtacgagctgaaaggcaacgacgatactgcgctgcgcatccgtcgtgctatctccgtgctgaaaagccttccgtttgaggtacgtagcctgaaagacacggaaggattgccctggatcagtgatgaagtcaaagggattatggaagaaatcatcgaagtcggggagtcgcgtgaagtgcaggccgtgctcaatgatgagtggtatcaaagcttccacgcatttacgcgtgtctttggagtgggggtgaagacagcagacaagtggtaccgtatgggtctgcgcaccctcgaggatgttcgttccagcaagaccctgaagttgaccccgtggcagaaagtaggtctgctgtattatgaagatcttgctcgcggcgttacgcgtgccgaagctgacgcgatttggctgctggttcaggatgcagtcgcaactttcgacccggatgcgatcgtggagattgtcggtggatttcgtcgtgggaaacctcagggtcacgacgttgatctgcttatcagttctccgggagctgaaaaagagcaagaagaccaactcctgcagaaagtgatgaatctgtggaagaaacaagggttgttgctgtgtggtcgtctggaatggagtcagtgggaatgggggaaaagtccatccggtaaggctgatgagggtgacgcggaggcgtcgtgctttctgatcctcaaactttatgatcatctggtgcgcaaaagtaaacgcaatatgccgactggttcgaacatgggcgagtccaaaccgtggaaagcaattaaagtagatctgctgcgttgcccccgcggcagttttgcgtttgcgatgttgcagtggaccggaagccgcatgttccgtcgtgatctgcgcgattacgccctggaagagaagaacatgatgctggacaatcattcgctgtatgacatgacccgcggtatccaactccctgctaaaagcgaagaggaaattttcgaacatctggggcttgaatacctggaaccgttcgaacgtaacgca

SEQ ID NO: 4586 - protein, 528 aa, synthetic construct
  REGION 1..528: note = Variant of terminal deoxynucleotidyltransferase
MHHHHHGGSGSHGIRTIDSDFGKKQQKKGDNHDSSATYEIKFHEFVLFILEEKMGATRRTFLTDLARKKGFRVENELTDEVTHIVAENLSRSEVLAWLKEHKMEKTKQFELLDISWLIESMKVGKPVDTKGKYQLAESVEVSANPDPTEGRVNELPPTMKTVSPYACQRRTSLNNRNKRFTDSLEILREMYELKGNDDTALRIRRAISVLKSLPFEVRSLKDTEGLPWISDEVKGIMEEIIEVGESREVQAVLNDEWYQSFHAFTRVFGVGVKTADKWYRMGLRTLEDVRSSKTLKLTPWQKVGLLYYEDLARGVTRAEADAIWLLVQDAVATFDPDAIVEIVGGFRRGKPQGHDVDLLISSPGAEKEQEDQLLQKVMNLWKKQGLLLCGRLEWSQWEWGKSPSGKADEGDAEASCFLILKLYDHLVRKSKRNMPTGSNMGESKPWKAIKVDLLRCPRGSFAFAMLQWTGSRMFRRDLRDYALEEKNMMLDNHSLYDMTRGIQLPAKSEEEIFEHLGLEYLEPFERNA

SEQ ID NO: 4587 - DNA, 1584 bp, synthetic construct
  misc_feature 1..1584: note = Variant of terminal deoxynucleotidyltransferase
  source 1..1584: mol_type = other DNA
atgcaccatcatcatcatggcggtagcggcagccacggcattcgtaccatcgattcggacttcgggaagaaacagcagaaaaaaggcgataaccacgatagttccgccacttatgaaatcaaatttcacgagtttgtgctgttcattctcgaagaaaaaatgggtgcgacgcgtcgtacttttctgacagatttagcccgcaagaaagggttccgcgtcgagaatgaactgaccgacgaagttacccacatcgtggcagaaaatctgtcacgctctgaagtattggcttggctgaaagaacacaagatggagaagaccaagcaattcgaactgctggatattagctggcttatcgaaagcatgaaagttggtaaaccggtggacaccaaggggaaataccagttggcggaatcggttgaggtgagtgcgaacccagatccgacagaaggtcgtgtaaacgagctgcctcctactatgaaaaccgtttctccgtatgcgtgtcaacgccgcacctcgctgatgaaccgtaatcgtcgttttacggactcgctggagattcttcgtgaaatgtacgagctgaaaggcaacgacgatactgcgctgcgcatccgtcgtgctatctccgtgctgaaaagccttccgtttgaggtacgtagcctgaaagacacggaaggattgccctggatcagtgatgaagtcaaagggattatggaagaaatcatcgaagtcggggagtcgcgtgaagtgcaggccgtgctcaatgatgagtggtatcaaagcttccacgcatttacgcgtgtctttggagtgggggtgaagacagcagacaagtggtaccgtatgggtctgcgcaccctcgaggatgttcgttccagcaagaccctgaagttgaccccgtggcagaaagtaggtctgctgtattatgaagatcttgctcgcggcgttacgcgtgccgaagctgacgcgatttggctgctggttcaggatgcagtcgcaactttcgacccggatgcgatcgtggagattgtcggtggatttcgtcgtgggaaacctcagggtcacgacgttgatctgcttatcagttctccgggagctgaaaaagagcaagaagaccaactcctgcagaaagtgatgaatctgtggaagaaacaagggttgttgctgtgtggtcgtctggaatggagtcagtgggaatgggggaaaagtggctccggtaaggctgatgagggtgacgcggaggcgtcgtgctttctgatcctcaaactttatgatcatctggtgcgcaaaagtaaacgcaatatgccgactggttcgaacatgggcgagtccaaaccgtggaaagcaattaaagtagatctgctgcgttgcccccgcggcagttttgcgtttgcgatgttgcagtggaccggaagccgcatgttccgtcgtgatctgcgcgattacgccctggaagagaagaacatgatgctggacaatcattcgctgtatgacatgactcgtggtatccaactccctgctaaaagcgaagaggaaattttcgaacatctggggcttgaatacctggaaccgttcgaacgtaacgca

SEQ ID NO: 4588 - protein, 528 aa, synthetic construct
  REGION 1..528: note = Variant of terminal deoxynucleotidyltransferase
MHHHHHGGSGSHGIRTIDSDFGKKQQKKGDNHDSSATYEIKFHEFVLFILEEKMGATRRTFLTDLARKKGFRVENELTDEVTHIVAENLSRSEVLAWLKEHKMEKTKQFELLDISWLIESMKVGKPVDTKGKYQLAESVEVSANPDPTEGRVNELPPTMKTVSPYACQRRTSLMNRNRRFTDSLEILREMYELKGNDDTALRIRRAISVLKSLPFEVRSLKDTEGLPWISDEVKGIMEEIIEVGESREVQAVLNDEWYQSFHAFTRVFGVGVKTADKWYRMGLRTLEDVRSSKTLKLTPWQKVGLLYYEDLARGVTRAEADAIWLLVQDAVATFDPDAIVEIVGGFRRGKPQGHDVDLLISSPGAEKEQEDQLLQKVMNLWKKQGLLLCGRLEWSQWEWGKSGSGKADEGDAEASCFLILKLYDHLVRKSKRNMPTGSNMGESKPWKAIKVDLLRCPRGSFAFAMLQWTGSRMFRRDLRDYALEEKNMMLDNHSLYDMTRGIQLPAKSEEEIFEHLGLEYLEPFERNA

SEQ ID NO: 4589 - DNA, 1584 bp, synthetic construct
  misc_feature 1..1584: note = Variant of terminal deoxynucleotidyltransferase
  source 1..1584: mol_type = other DNA
atgcaccatcatcatcatggcggtagcggcagccacggcattcgtaccatcgattcggacttcgggaagaaacagcagaaaaaaggcgataaccacgatagttccgccacttatgaaatcaaatttcacgagtttgtgctgttcattctcgaagaaaaaatgggtgcgacgcgtcgtacttttctgacagatttagcccgcaagaaagggttccgcgtcgagaatgaactgaccgacgaagttacccacatcgtggcagaaaatctgtcacgctctgaagtattggcttggctgaaagaacacaagatggagaagaccaagcaattcgaactgctggatattagctggcttatcgaaagcatgaaagttggtaaaccggtggacaccaaggggaaataccagttggcggaatcggttgaggtgagtgcgaacccagatccgacagaaggtcgtgtaaacgagctgcctcctactatgaaaaccgtttctccgtatgcgtgtcaacgccgcaccaccctgaacaaccgtaatcaacgttttacggactcgctggagattcttcgtgaaatgtacgagctgaaaggcaacgacgatactgcgctgcgcatccgtcgtgctatctccgtgctgaaaagccttccgtttgaggtacgtagcctgaaagacacggaaggattgccctggatcagtgatgaagtcaaagggattatggaagaaatcatcgaagtcggggagtcgcgtgaagtgcaggccgtgctcaatgatgagtggtatcaaagcttccacgcatttacgcgtgtctttggagtgggggtgaagacagcagacaagtggtaccgtatgggtctgcgcaccctcgaggatgttcgttccagcaagaccctgaagttgaccccgtggcagaaagtaggtctgctgtattatgaagatcttgctcgcggcgttacgcgtgccgaagctgacgcgatttggctgctggttcaggatgcagtcgcaactttcgacccggatgcgatcgtggagattgtcggtggatttcgtcgtgggaaacctcagggtcacgacgttgatctgcttatcagttctccgggagctgaaaaagagcaagaagaccaactcctgcagaaagtgatgaatctgtggaagaaacaagggttgttgctgtgcggtcgtctggaaaccagtcagtgggaatgggggggttcgccttccggtaaggctgatgagggtgacgcggaggcgtcgtgctttctgatcctcaaactttatgatcatctggtgcgcaaaagtaaacgcaatatgccgactggttcgaacatgggcgagtccaaaccgtggaaagcaattaaagtagatctgctgcgttgcccccgcggcagttttgcgtttgcgatgttgcagtggaccggaagccgcatgttccgtcgtgatctgcgcgattacgccctggaagagaagaacatgatgctggacaatcattcgctgtatgacatgactcgtggtatccaactccctgctaaatcggaagaggaaattttcgaacatctggggcttgaatacctggaaccgttcgaacgtaacgca

SEQ ID NO: 4590 - protein, 528 aa, synthetic construct
  REGION 1..528: note = Variant of terminal deoxynucleotidyltransferase
MHHHHHGGSGSHGIRTIDSDFGKKQQKKGDNHDSSATYEIKFHEFVLFILEEKMGATRRTFLTDLARKKGFRVENELTDEVTHIVAENLSRSEVLAWLKEHKMEKTKQFELLDISWLIESMKVGKPVDTKGKYQLAESVEVSANPDPTEGRVNELPPTMKTVSPYACQRRTTLNNRNQRFTDSLEILREMYELKGNDDTALRIRRAISVLKSLPFEVRSLKDTEGLPWISDEVKGIMEEIIEVGESREVQAVLNDEWYQSFHAFTRVFGVGVKTADKWYRMGLRTLEDVRSSKTLKLTPWQKVGLLYYEDLARGVTRAEADAIWLLVQDAVATFDPDAIVEIVGGFRRGKPQGHDVDLLISSPGAEKEQEDQLLQKVMNLWKKQGLLLCGRLETSQWEWGGSPSGKADEGDAEASCFLILKLYDHLVRKSKRNMPTGSNMGESKPWKAIKVDLLRCPRGSFAFAMLQWTGSRMFRRDLRDYALEEKNMMLDNHSLYDMTRGIQLPAKSEEEIFEHLGLEYLEPFERNA

SEQ ID NO: 4591 - DNA, 1584 bp, synthetic construct
  misc_feature 1..1584: note = Variant of terminal deoxynucleotidyltransferase
  source 1..1584: mol_type = other DNA
atgcaccatcatcatcatggcggtagcggcagccacggcattcgtaccatcgattcggacttcgggaagaaacagcagaaaaaaggcgataaccacgatagttccgccacttatgaaatcaaatttcacgagtttgtgctgttcattctcgaagaaaaaatgggtgcgacgcgtcgtacttttctgacagatttagcccgcaagaaagggttccgcgtcgagaatgaactgaccgacgaagttacccacatcgtggcagaaaatctgtcacgctctgaagtattggcttggctgaaagaacacaagatggagaagaccaagcaattcgaactgctggatattagctggcttatcgaaagcatgaaagttggtaaaccggtggacaccaaggggaaataccagttggcggaatcggttgaggtgagtgcgaacccagatccgacagaaggtcgtgtaaacgagctgcctcctactatgaaaaccgtttctccgtatgcgtgtcaacgccgcaccaccctgaacaaccgtaatcaacgttttacggactcgctggagattcttcgtgaaatgtacgagctgaaaggcaacgacgatactgcgctgcgcatccgtcgtgctatctccgtgctgaaaagccttccgtttgaggtacgtagcctgaaagacacggaaggattgccctggatcagtgatgaagtcaaagggattatggaagaaatcatcgaagtcggggagtcgcgtgaagtgcaggccgtgctcaatgatgagtggtatcaaagcttccacgcatttacgcgtgtctttggagtgggggtgaagacagcagacaagtggtaccgtatgggtctgcgcaccctcgaggatgttcgttccagcaagaccctgaagttgaccccgtggcagaaagtaggtctgctgtattatgaagatcttgctcgcggcgttacgcgtgccgaagctgacgcgatttggctgctggttcaggatgcagtcgcaactttcgacccggatgcgatctgtgagattgtcggtggatttcgtcgtgggaaacctcagggtcacgacgttgatctgcttatcagttctccgggagctgagaaagagcaagaagaccaactcctgcagaaagtgatgaatctgtggaagaaacaagggttgttgctgtgcggtcgtctggaaaccagtcagtgggaatgggggggttcgccttccggtaaggctgatgagggtgacgcggaggcgtcgtgctttctgatcctcaaactttatgatcatctggtgcgcaaaagtaaacgcaatatgccgactggttcgaacatgggcgagtccaaaccgtggaaagcaattaaagtagatctgctgcgttgcccccgcggcagttttgcgtttgcgatgttgcagtggaccggaagccgcatgttccgtcgtgatctgcgcgattacgccctggaagagaagaacatgatgctggacaatcattcgctgtatgacatgactcgtggtatccaactccctgctaaatcggaagaggaaattttcgaacatctggggcttgaatacctggaaccgttcgaacgtaacgca

SEQ ID NO: 4592 - protein, 528 aa, synthetic construct
  REGION 1..528: note = Variant of terminal deoxynucleotidyltransferase
MHHHHHGGSGSHGIRTIDSDFGKKQQKKGDNHDSSATYEIKFHEFVLFILEEKMGATRRTFLTDLARKKGFRVENELTDEVTHIVAENLSRSEVLAWLKEHKMEKTKQFELLDISWLIESMKVGKPVDTKGKYQLAESVEVSANPDPTEGRVNELPPTMKTVSPYACQRRTTLNNRNQRFTDSLEILREMYELKGNDDTALRIRRAISVLKSLPFEVRSLKDTEGLPWISDEVKGIMEEIIEVGESREVQAVLNDEWYQSFHAFTRVFGVGVKTADKWYRMGLRTLEDVRSSKTLKLTPWQKVGLLYYEDLARGVTRAEADAIWLLVQDAVATFDPDAICEIVGGFRRGKPQGHDVDLLISSPGAEKEQEDQLLQKVMNLWKKQGLLLCGRLETSQWEWGGSPSGKADEGDAEASCFLILKLYDHLVRKSKRNMPTGSNMGESKPWKAIKVDLLRCPRGSFAFAMLQWTGSRMFRRDLRDYALEEKNMMLDNHSLYDMTRGIQLPAKSEEEIFEHLGLEYLEPFERNA

SEQ ID NO: 4593 - DNA, 1584 bp, synthetic construct
  misc_feature 1..1584: note = Variant of terminal deoxynucleotidyltransferase
  source 1..1584: mol_type = other DNA
atgcaccatcatcatcatggcggtagcggcagccacggcattcgtaccatcgattcggacttcgggaagaaacagcagaaaaaaggcgataaccacgatagttccgccacttatgaaatcaaatttcacgagtttgtgctgttcattctcgaagaaaaaatgggtgcgacgcgtcgtacttttctgacagatttagcccgcaagaaagggttccgcgtcgagaatgaactgaccgacgaagttacccacatcgtggcagaaaatctgtcacgctctgaagtattggcttggctgaaagaacacaagatggagaagaccaagcaattcgaactgctggatattagctggcttatcgaaagcatgaaagttggtaaaccggtggacaccaaggggaaataccagttggcggaatcggttgaggtgagtgcgaacccagatccgacagaaggtcgtgtaaacgagctgcctcctactatgaaaaccgtttctccgtatgcgtgtcaacgccgcaccaccctgaacaaccgtaatcaacgttttacggactcgctggagattcttcgtgaaatgtacgagctgaaaggcaacgacgatactgcgctgcgcatccgtcgtgctatctccgtgctgaaaagccttccgtttgaggtacgtagcctgaaagacacggaaggattgccctggatcagtgatgaagtcaaagggattatggaagaaatcatcgaagtcggggagtcgcgtgaagtgcaggccgtgctcaatgatgagtggtatcaaagcttccacgcatttacgcgtgtctttggagtgggggtgaagacagcagacaagtggtaccgtatgggtctgcgcaccctcgaggatgttcgttccagcaagaccctgaagttgaccccgtggcagaaagtaggtctgctgtattatgaagatcttgctcgcggcgttacgcgtgcggaagctgacgcgatttggctgctggttcaggatgcagtcgcaactttcgacccggatgcgatcgtggagattgtcggtggatttcgtcgtgggaaacctcagggtcacgacgttgatctgcttatcagttctccgggagctgaaaaagagcaagaagaccaactcctgcagaaagtgatgaatctgtggaagaaacaagggttgttgctgtgtggtcgtctggaatggagtcagtgggaatgggggggttcgccttccctgaaggctgatgagggtgacgcggaggcgtcgtgctttctgatcctcaaactttatgatcatctggtgcgcaaaagtaaacgcaatatgccgactggttcgaacatgggcgagtccaaaccgtggaaagcaattaaagtagatctgctgcgttgcccccgcggcagttttgcgtttgcgatgttgcagtggaccggaagccgcatgttccgtcgtgatctgcgcgactacgcccgcgaagagaagaacatgatgctggacaatcattcgctgtatgacatgactcgtggtatccaactccctgctaaatcggaagaggaaattttcgaacatctggggcttgaatacctggaaccgttcgaacgtaacgca

SEQ ID NO: 4594 - protein, 528 aa, synthetic construct
  REGION 1..528: note = Variant of terminal deoxynucleotidyltransferase
MHHHHHGGSGSHGIRTIDSDFGKKQQKKGDNHDSSATYEIKFHEFVLFILEEKMGATRRTFLTDLARKKGFRVENELTDEVTHIVAENLSRSEVLAWLKEHKMEKTKQFELLDISWLIESMKVGKPVDTKGKYQLAESVEVSANPDPTEGRVNELPPTMKTVSPYACQRRTTLNNRNQRFTDSLEILREMYELKGNDDTALRIRRAISVLKSLPFEVRSLKDTEGLPWISDEVKGIMEEIIEVGESREVQAVLNDEWYQSFHAFTRVFGVGVKTADKWYRMGLRTLEDVRSSKTLKLTPWQKVGLLYYEDLARGVTRAEADAIWLLVQDAVATFDPDAIVEIVGGFRRGKPQGHDVDLLISSPGAEKEQEDQLLQKVMNLWKKQGLLLCGRLEWSQWEWGGSPSLKADEGDAEASCFLILKLYDHLVRKSKRNMPTGSNMGESKPWKAIKVDLLRCPRGSFAFAMLQWTGSRMFRRDLRDYAREEKNMMLDNHSLYDMTRGIQLPAKSEEEIFEHLGLEYLEPFERNA

SEQ ID NO: 4595 - DNA, 1584 bp, synthetic construct
  misc_feature 1..1584: note = Variant of terminal deoxynucleotidyltransferase
  source 1..1584: mol_type = other DNA
atgcaccatcatcatcatggcggtagcggcagccacggcattcgtaccatcgattcggacttcgggaagaaacagcagaaaaaaggcgataaccacgatagttccgccacttatgaaatcaaatttcacgagtttgtgctgttcattctcgaagaaaaaatgggtgcgacgcgtcgtacttttctgacagatttagcccgcaagaaagggttccgcgtcgagaatgaactgaccgacgaagttacccacatcgtggcagaaaatctgtcacgctctgaagtattggcttggctgaaagaacacaagatggagaagaccaagcaattcgaactgctggatattagctggcttatcgaaagcatgaaagttggtaaaccggtggacaccaaggggaaataccagttggcggaatcggttgaggtgagtgcgaacccagatccgacagaaggtcgtgtaaacgagctgcctcctactatgaaaaccgtttctccgtatgcgtgtcaacgccgcaccaccctgaacaaccgtaatcaacgttttacggactcgctggagattcttcgtgaaatgtacgagctgaaaggcaacgacgatactgcgctgcgcatccgtcgtgctatctccgtgctgaaaagccttccgtttgaggtacgtagcctgaaagacacggaaggattgccctggatcagtgatgaagtcaaagggattatggaagaaatcatcgaagtcggggagtcgcgtgaagtgcaggccgtgctcaatgatgagtggtatcaaagcttccacgcatttacgcgtgtctttggagtgggggtgaagacagcagacaagtggtaccgtatgggtctgcgcaccctcgaggatgttcgttccagcaagaccctgaagttgaccccgtggcagaaagtaggtctgctgtattatgaagatcttgctcgcggcgttacgcgtgccgaagctgacgcgatttggctgctggttcaggatgcagtcgcaactttcgacccggatgcgatcgtggagattgtcggtggatttcgtcgtgggaaacctcagggtcacgacgttgatctgcttatcagttctccgggagctgaaaaagagcaagaagaccaactcctgcagaaagtgatgaatctgtggaagaaacaagggttgttgctgtgtggtcgtctggaatggagtcagtgggaatgggggggtctgggctccggtaaggctgatgagggtgacgcggaggcgtcgtgctttctgatcctcaaactttatgatcatctggtgcgcaaaagtaaacgcaatatgccgactggttcgaacatgggcgagtccaaaccgtggaaagcaattaaagtagatctgctgcgttgcccccgcggcagttttgcgtttgcgatgttgcagtggaccggaagccgcatgttccgtcgtgatctgcgcgattacgccctggaagagaagaacatgatgctggacaatcattcgctgtatgacatgactcgtggtatccaactccctgctaaatcggaagaggaaattttcgaacatctggggcttgaatacctggaaccgttcgaacgtaacgca

SEQ ID NO: 4596 - protein, 528 aa, synthetic construct
  REGION 1..528: note = Variant of terminal deoxynucleotidyltransferase
MHHHHHGGSGSHGIRTIDSDFGKKQQKKGDNHDSSATYEIKFHEFVLFILEEKMGATRRTFLTDLARKKGFRVENELTDEVTHIVAENLSRSEVLAWLKEHKMEKTKQFELLDISWLIESMKVGKPVDTKGKYQLAESVEVSANPDPTEGRVNELPPTMKTVSPYACQRRTTLNNRNQRFTDSLEILREMYELKGNDDTALRIRRAISVLKSLPFEVRSLKDTEGLPWISDEVKGIMEEIIEVGESREVQAVLNDEWYQSFHAFTRVFGVGVKTADKWYRMGLRTLEDVRSSKTLKLTPWQKVGLLYYEDLARGVTRAEADAIWLLVQDAVATFDPDAIVEIVGGFRRGKPQGHDVDLLISSPGAEKEQEDQLLQKVMNLWKKQGLLLCGRLEWSQWEWGGLGSGKADEGDAEASCFLILKLYDHLVRKSKRNMPTGSNMGESKPWKAIKVDLLRCPRGSFAFAMLQWTGSRMFRRDLRDYALEEKNMMLDNHSLYDMTRGIQLPAKSEEEIFEHLGLEYLEPFERNA

SEQ ID NO: 4597 - DNA, 1584 bp, synthetic construct
  misc_feature 1..1584: note = Variant of terminal deoxynucleotidyltransferase
  source 1..1584: mol_type = other DNA
atgcaccatcatcatcatggcggtagcggcagccacggcattcgtaccatcgattcggacttcgggaagaaacagcagaaaaaaggcgataaccacgatagttccgccacttatgaaatcaaatttcacgagtttgtgctgttcattctcgaagaaaaaatgggtgcgacgcgtcgtacttttctgacagatttagcccgcaagaaagggttccgcgtcgagaatgaactgaccgacgaagttacccacatcgtggcagaaaatctgtcacgctctgaagtattggcttggctgaaagaacacaagatggagaagaccaagcaattcgaactgctggatattagctggcttatcgaaagcatgaaagttggtaaaccggtggacaccaaggggaaataccagttggcggaatcggttgaggtgagtgcgaacccagatccgacagaaggtcgtgtaaacgagctgcctcctactatgaaaaccgtttctccgtatgcgtgtcaacgccgcacctcgctgatgaaccgtaatcgtcgttttacggactcgctggagattcttcgtgaaatgtacgagctgaaaggcaacgacgatactgcgctgcgcatccgtcgtgctatctccgtgctgaaaagccttccgtttgaggtacgtagcctgaaagacacggaaggattgccctggatcagtgatgaagtcaaagggattatggaagaaatcatcgaagtcggggagtcgcgtgaagtgcaggccgtgctcaatgatgagtggtatcaaagcttccacgcatttacgcgtgtctttggagtgggggtgaagacagcagacaagtggtaccgtatgggtctgcgcaccctcgaggatgttcgttccagcaagaccctgaagttgaccccgtggcagaaagtaggtctgctgtattatgaagatcttgctcgcggcgttacgcgtgccgaagctgacgcgatttggctgctggttcaggatgcagtcgcaactttcgacccggatgcgatcgtggagattgtcggtggatttcgtcgtgggaaacctcagggtcacgacgttgatctgcttatcagttctccgggagctgaaaaagagcaagaagaccaactcctgcagaaagtgatgaatctgtggaagaaacaagggttgttgctgtgtggtcgtctggaatggagtcagtgggaatgggggaaaagtggctccggtaaggctgatgagggtgacgcggaggcgtcgtgctttctgatcctcaaactttatgatcatctggtgcgcaaaagtaaacgcaatatgccgactggttcgaacatgggcgagtccaaaccgtggaaagcaattaaagtagatctgctgcgttgcccccgcggcagttttgcgtttgcgatgttgcagtggaccggaagccgcatgttccgtcgtgatctgcgcgattacgccctggaagagaagaacatgatgctggacaatcattcgctgtatgacatgacccgcggtatccaactccctgctcgtagcgaagaggaaattttcgaacatctggggcttgaatacctggaaccgttcgaacgtaacgca

SEQ ID NO: 4598 - protein, 528 aa, synthetic construct
  REGION 1..528: note = Variant of terminal deoxynucleotidyltransferase
MHHHHHGGSGSHGIRTIDSDFGKKQQKKGDNHDSSATYEIKFHEFVLFILEEKMGATRRTFLTDLARKKGFRVENELTDEVTHIVAENLSRSEVLAWLKEHKMEKTKQFELLDISWLIESMKVGKPVDTKGKYQLAESVEVSANPDPTEGRVNELPPTMKTVSPYACQRRTSLMNRNRRFTDSLEILREMYELKGNDDTALRIRRAISVLKSLPFEVRSLKDTEGLPWISDEVKGIMEEIIEVGESREVQAVLNDEWYQSFHAFTRVFGVGVKTADKWYRMGLRTLEDVRSSKTLKLTPWQKVGLLYYEDLARGVTRAEADAIWLLVQDAVATFDPDAIVEIVGGFRRGKPQGHDVDLLISSPGAEKEQEDQLLQKVMNLWKKQGLLLCGRLEWSQWEWGKSGSGKADEGDAEASCFLILKLYDHLVRKSKRNMPTGSNMGESKPWKAIKVDLLRCPRGSFAFAMLQWTGSRMFRRDLRDYALEEKNMMLDNHSLYDMTRGIQLPARSEEEIFEHLGLEYLEPFERNA

SEQ ID NO: 4599 - DNA, 1584 bp, synthetic construct
  misc_feature 1..1584: note = Variant of terminal deoxynucleotidyltransferase
  source 1..1584: mol_type = other DNA
atgcaccatcatcatcatggcggtagcggcagccacggcattcgtaccatcgattcggacttcgggaagaaacagcagaaaaaaggcgataaccacgatagttccgccacttatgaaatcaaatttcacgagtttgtgctgttcattctcgaagaaaaaatgggtgcgacgcgtcgtacttttctgacagatttagcccgcaagaaagggttccgcgtcgagaatgaactgaccgacgaagttacccacatcgtggcagaaaatctgtcacgctctgaagtattggcttggctgaaagaacacaagatggagaagaccaagcaattcgaactgctggatattagctggcttatcgaaagcatgaaagttggtaaaccggtggacaccaaggggaaataccagttggcggaatcggttgaggtgagtgcgaacccagatccgacagaaggtcgtgtaaacgagctgcctcctactatgaaaaccgtttctccgtatgcgtgtcaacgccgcaccacgctgaacaaccgtaataagcgttttacggactcgctggagattcttcgtgaaatgtacgagctgaaaggcaacgacgatactgcgctgcgcatccgtcgtgctatctccgtgctgaaaagccttccgtttgaggtacgtagcctgaaagacacggaaggattgccctggatcagtgatgaagtcaaagggattatggaagaaatcatcgaagtcggggagtcgcgtgaagtgcaggccgtgctcaatgatgagtggtatcaaagcttccacgcatttacgcgtgtctttggagtgggggtgaagacagcagacaagtggtaccgtatgggtctgcgcaccctcgaggatgttcgttccagcaagaccctgaagttgaccccgtggcagaaagtaggtctgctgtattatgaagatcttgctcgcggcgttacgcgtgccgaagctgacgcgatttggctgctggttcaggatgcagtcgcaactttcgacccggatgcgatcgtggagattgtcggtggatttcgtcgtgggaaacctcagggtcacgacgttgatctgcttatcagttctccgggagctgaaaaagagcaagaagaccaactcctgcagaaagtgatgaatctgtggaagaaacaagggttgttgctgtgtggtcgtctggaatggagtcagtgggaatgggggaaaagtggctccggtaaggctgatgagggtgacgcggaggcgtcgtgctttctgatcctcaaactttatgatcatctggtgcgcaaaagtaaacgcaatatgccgactggttcgaacatgggcgagtccaaaccgtggaaagcaattaaagtagatctgctgcgttgcccccgcggcagttttgcgtttgcgatgttgcagtggaccggaagccgcatgttccgtcgtgatctgcgcgattacgccctggaagagaagaacatgatgctggacaatcattcgctgtatgacatgactcgtggtatccaactccctgctaaatcggaagaggaaattttcgaacatctggggcttgaatacctggaaccgttcgaacgtaacgca

SEQ ID NO: 4600 - protein, 528 aa, synthetic construct
  REGION 1..528: note = Variant of terminal deoxynucleotidyltransferase
MHHHHHGGSGSHGIRTIDSDFGKKQQKKGDNHDSSATYEIKFHEFVLFILEEKMGATRRTFLTDLARKKGFRVENELTDEVTHIVAENLSRSEVLAWLKEHKMEKTKQFELLDISWLIESMKVGKPVDTKGKYQLAESVEVSANPDPTEGRVNELPPTMKTVSPYACQRRTTLNNRNKRFTDSLEILREMYELKGNDDTALRIRRAISVLKSLPFEVRSLKDTEGLPWISDEVKGIMEEIIEVGESREVQAVLNDEWYQSFHAFTRVFGVGVKTADKWYRMGLRTLEDVRSSKTLKLTPWQKVGLLYYEDLARGVTRAEADAIWLLVQDAVATFDPDAIVEIVGGFRRGKPQGHDVDLLISSPGAEKEQEDQLLQKVMNLWKKQGLLLCGRLEWSQWEWGKSGSGKADEGDAEASCFLILKLYDHLVRKSKRNMPTGSNMGESKPWKAIKVDLLRCPRGSFAFAMLQWTGSRMFRRDLRDYALEEKNMMLDNHSLYDMTRGIQLPAKSEEEIFEHLGLEYLEPFERNA

SEQ ID NO: 4601 - DNA, 1584 bp, synthetic construct
  misc_feature 1..1584: note = Variant of terminal deoxynucleotidyltransferase
  source 1..1584: mol_type = other DNA
atgcaccatcatcatcatggcggtagcggcagccacggcattcgtaccatcgattcggacttcgggaagaaacagcagaaaaaaggcgataaccacgatagttccgccacttatgaaatcaaatttcacgagtttgtgctgttcattctcgaagaaaaaatgggtgcgacgcgtcgtacttttctgacagatttagcccgcaagaaagggttccgcgtcgagaatgaactgaccgacgaagttacccacatcgtggcagaaaatctgtcacgctctgaagtattggcttggctgaaagaacacaagatggagaagaccaagcaattcgaactgctggatattagctggcttatcgaaagcatgaaagttggtaaaccggtggacaccaaggggaaataccagttggcggaatcggttgaggtgagtgcgaacccagatccgacagaaggtcgtgtaaacgagctgcctcctactatgaaaaccgtttctccgtatgcgtgtcaacgccgcaccacgctgaacaaccgtaatcagcgttttacggactcgctggagattcttcgtgaaatgtacgagctgaaaggcaacgacgatactgcgctgcgcatccgtcgtgctatctccgtgctgaaaagccttccgtttgaggtacgtagcctgaaagacacggaaggattgccctggatcagtgatgaagtcaaagggattatggaagaaatcatcgaagtcggggagtcgcgtgaagtgcaggccgtgctcaatgatgagtggtatcaaagcttccacgcatttacgcgtgtctttggagtgggggtgaagacagcagacaagtggtaccgtatgggtctgcgcaccctcgaggatgttcgttccagcaagaccctgaagttgaccccgtggcagaaagtaggtctgctgtattatgaagatcttgctcgcggcgttacgcgtgccgaagctgacgcgatttggctgctggttcaggatgcagtcgcaactttcgacccggatgcgatcgtggagattgtcggtggatttcgtcgtgggaaacctcagggtcacgacgttgatctgcttatcagttctccgggagctgaaaaagagcaagaagaccaactcctgcagaaagtgatgaatctgtggaagaaacaagggttgttgctgtgtggtcgtctggaatggagtcagtgggaatgggggaaaagtccatccggtaaggctgatgagggtgacgcggaggcgtcgtgctttctgatcctcaaactttatgatcatctggtgcgcaaaagtaaacgcaatatgccgactggttcgaacatgggcgagtccaaaccgtggaaagcaattaaagtagatctgctgcgttgcccccgcggcagttttgcgtttgcgatgttgcagtggaccggaagccgcatgttccgtcgtgatctgcgcgattacgccctggaagagaagaacatgatgctggacaatcattcgctgtatgacatgactcgtggtatccaactccctgctaaatcggaagaggaaattttcgaacatctggggcttgaatacctggaaccgttcgaacgtaacgca

SEQ ID NO: 4602 - protein, 528 aa, synthetic construct
  REGION 1..528: note = Variant of terminal deoxynucleotidyltransferase
MHHHHHGGSGSHGIRTIDSDFGKKQQKKGDNHDSSATYEIKFHEFVLFILEEKMGATRRTFLTDLARKKGFRVENELTDEVTHIVAENLSRSEVLAWLKEHKMEKTKQFELLDISWLIESMKVGKPVDTKGKYQLAESVEVSANPDPTEGRVNELPPTMKTVSPYACQRRTTLNNRNQRFTDSLEILREMYELKGNDDTALRIRRAISVLKSLPFEVRSLKDTEGLPWISDEVKGIMEEIIEVGESREVQAVLNDEWYQSFHAFTRVFGVGVKTADKWYRMGLRTLEDVRSSKTLKLTPWQKVGLLYYEDLARGVTRAEADAIWLLVQDAVATFDPDAIVEIVGGFRRGKPQGHDVDLLISSPGAEKEQEDQLLQKVMNLWKKQGLLLCGRLEWSQWEWGKSPSGKADEGDAEASCFLILKLYDHLVRKSKRNMPTGSNMGESKPWKAIKVDLLRCPRGSFAFAMLQWTGSRMFRRDLRDYALEEKNMMLDNHSLYDMTRGIQLPAKSEEEIFEHLGLEYLEPFERNA

SEQ ID NO: 4603 - DNA, 1584 bp, synthetic construct
  misc_feature 1..1584: note = Variant of terminal deoxynucleotidyltransferase
  source 1..1584: mol_type = other DNA
atgcaccatcatcatcatggcggtagcggcagccacggcattcgtaccatcgattcggacttcgggaagaaacagcagaaaaaaggcgataaccacgatagttccgccacttatgaaatcaaatttcacgagtttgtgctgttcattctcgaagaaaaaatgggtgcgacgcgtcgtacttttctgacagatttagcccgcaagaaagggttccgcgtcgagaatgaactgaccgacgaagttacccacatcgtggcagaaaatctgtcacgctctgaagtattggcttggctgaaagaacacaagatggagaagaccaagcaattcgaactgctggatattagctggcttatcgaaagcatgaaagttggtaaaccggtggacaccaaggggaaataccagttggcggaatcggttgaggtgagtgcgaacccagatccgacagaaggtcgtgtaaacgagctgcctcctactatgaaaaccgtttctccgtatgcgtgtcaacgccgcaccacgctgatgaaccgtaatcgtcgttttacggactcgctggagattcttcgtgaaatgtacgagctgaaaggcaacgacgatactgcgctgcgcatccgtcgtgctatctccgtgctgaaaagccttccgtttgaggtacgtagcctgaaagacacggaaggattgccctggatcagtgatgaagtcaaagggattatggaagaaatcatcgaagtcggggagtcgcgtgaagtgcaggccgtgctcaatgatgagtggtatcaaagcttccacgcatttacgcgtgtctttggagtgggggtgaagacagcagacaagtggtaccgtatgggtctgcgcaccctcgaggatgttcgttccagcaagaccctgaagttgaccccgtggcagaaagtaggtctgctgtattatgaagatcttgctcgcggcgttacgcgtgccgaagctgacgcgatttggctgctggttcaggatgcagtcgcaactttcgacccggatgcgatcgtggagattgtcggtggatttcgtcgtgggaaacctcagggtcacgacgttgatctgcttatcagttctccgggagctgaaaaagagcaagaagaccaactcctgcagaaagtgatgaatctgtggaagaaacaagggttgttgctgtgtggtcgtctggaatggagtcagtgggaatgggggggttcgccttccggtaaggctgatgagggtgacgcggaggcgtcgtgctttctgatcctcaaactttatgatcatctggtgcgcaaaagtaaacgcaatatgccgactggttcgaacatgggcgagtccaaaccgtggaaagcaattaaagtagatctgctgcgttgcccccgcggcagttttgcgtttgcgatgttgcagtggaccggaagccgcatgttccgtcgtgatctgcgcgattacgccctggaagagaagaacatgatgctggacaatcattcgctgtatgacatgactcgtggtatccaactccctgctaaatcggaagaggaaattttcgaacatctggggcttgaatacctggaaccgttcgaacgtaacgca

SEQ ID NO: 4604 - protein, 528 aa, synthetic construct
  REGION 1..528: note = Variant of terminal deoxynucleotidyltransferase
MHHHHHGGSGSHGIRTIDSDFGKKQQKKGDNHDSSATYEIKFHEFVLFILEEKMGATRRTFLTDLARKKGFRVENELTDEVTHIVAENLSRSEVLAWLKEHKMEKTKQFELLDISWLIESMKVGKPVDTKGKYQLAESVEVSANPDPTEGRVNELPPTMKTVSPYACQRRTTLMNRNRRFTDSLEILREMYELKGNDDTALRIRRAISVLKSLPFEVRSLKDTEGLPWISDEVKGIMEEIIEVGESREVQAVLNDEWYQSFHAFTRVFGVGVKTADKWYRMGLRTLEDVRSSKTLKLTPWQKVGLLYYEDLARGVTRAEADAIWLLVQDAVATFDPDAIVEIVGGFRRGKPQGHDVDLLISSPGAEKEQEDQLLQKVMNLWKKQGLLLCGRLEWSQWEWGGSPSGKADEGDAEASCFLILKLYDHLVRKSKRNMPTGSNMGESKPWKAIKVDLLRCPRGSFAFAMLQWTGSRMFRRDLRDYALEEKNMMLDNHSLYDMTRGIQLPAKSEEEIFEHLGLEYLEPFERNA

SEQ ID NO: 4605 - DNA, 1584 bp, synthetic construct
  misc_feature 1..1584: note = Variant of terminal deoxynucleotidyltransferase
  source 1..1584: mol_type = other DNA
atgcaccatcatcatcatggcggtagcggcagccacggcattcgtaccatcgattcggacttcgggaagaaacagcagaaaaaaggcgataaccacgatagttccgccacttatgaaatcaaatttcacgagtttgtgctgttcattctcgaagaaaaaatgggtgcgacgcgtcgtacttttctgacagatttagcccgcaagaaagggttccgcgtcgagaatgaactgaccgacgaagttacccacatcgtggcagaaaatctgtcacgctctgaaatattggcttggctgaaagaacacaagatggagaagaccaagcaattcgaactgctggatattagctggcttatcgaaagcatgaaagttggtaaaccggtggacaccaaggggaaataccagttggcggaatcggttgaggtgagtgcgaacccagatccgacagaaggtcgtgtaaacgagctgcctcctactatgaaaaccgtttctccgtatgcgtgtcaacgccgcaccaccctgaacaaccgtaatcaacgttttacggactcgctggagattcttcgtgaaatgtacgagctgaaaggcaacgacgatactgcgctgcgcatccgtcgtgctatctccgtgctgaaaagccttccgtttgaggtacgtagcctgaaagacacggaaggattgccctggatcagtgatgaagtcaaagggattatggaagaaatcatcgaagtcggggagtcgcgtgaagtgcaggccgtgctcaatgatgagtggtatcaaagcttccacgcatttacgcgtgtctttggagtgggggtgaagacagcagacaagtggtaccgtatgggtctgcgcaccctcgaggatgttcgttccagcaagaccctgaagttgaccccgtggcagaaagtaggtctgctgtattatgaagatcttgctcgcggcgttacgcgtgccgaagctgacgcgatttggctgctggttcaggatgcagtcgcaactttcgacccggatgcgatcgtagagattgtcggtggatttcgtcgtgggaaacctcagggtcacgacgttgatctgcttatcagttctccgggatttgagcgcgagcaagaagaccaactcctgcagaaagtgatgaatctgtggaagaaacaagggttgttgctgtgcggtcgtctggaatggagtcagtgggaatgggggggttcgccttccggtaaggctgatgagggtgacgcggaggcgtcgtgctttctgatcctcaaactttatgatcatctggtgcgcaaaagtaaacgcaatatgccgactggttcgaacatgggcgagtccaaaccgtggaaagcaattaaagtagatctgctgcgttgcccccgcggcagttttgcgtttgcgatgttgcagtggaccggaagccgcatgttccgtcgtgatctgcgcgattacgccctggaagagaagaacatgatgctggacaatcattcgctgtatgacatgactcgtggtatccaactccctgctaaatcggaagaggaaattttcgaacatctggggcttgaatacctggaaccgttcgaacgtaacgca

SEQ ID NO: 4606 - protein, 528 aa, synthetic construct
  REGION 1..528: note = Variant of terminal deoxynucleotidyltransferase
MHHHHHGGSGSHGIRTIDSDFGKKQQKKGDNHDSSATYEIKFHEFVLFILEEKMGATRRTFLTDLARKKGFRVENELTDEVTHIVAENLSRSEILAWLKEHKMEKTKQFELLDISWLIESMKVGKPVDTKGKYQLAESVEVSANPDPTEGRVNELPPTMKTVSPYACQRRTTLNNRNQRFTDSLEILREMYELKGNDDTALRIRRAISVLKSLPFEVRSLKDTEGLPWISDEVKGIMEEIIEVGESREVQAVLNDEWYQSFHAFTRVFGVGVKTADKWYRMGLRTLEDVRSSKTLKLTPWQKVGLLYYEDLARGVTRAEADAIWLLVQDAVATFDPDAIVEIVGGFRRGKPQGHDVDLLISSPGFEREQEDQLLQKVMNLWKKQGLLLCGRLEWSQWEWGGSPSGKADEGDAEASCFLILKLYDHLVRKSKRNMPTGSNMGESKPWKAIKVDLLRCPRGSFAFAMLQWTGSRMFRRDLRDYALEEKNMMLDNHSLYDMTRGIQLPAKSEEEIFEHLGLEYLEPFERNA

SEQ ID NO: 4607 - DNA, 1584 bp, synthetic construct
  misc_feature 1..1584: note = Variant of terminal deoxynucleotidyltransferase
  source 1..1584: mol_type = other DNA
atgcaccatcatcatcatggcggtagcggcagccacggcattcgtaccatcgattcggacttcgggaagaaacagcagaaaaaaggcgataaccacgatagttccgccacttatgaaatcaaatttcacgagtttgtgctgttcattctcgaagaaaaaatgggtgcgacgcgtcgtacttttctgacagatttagcccgcaagaaagggttccgcgtcgagaatgaactgaccgacgaagttacccacatcgtggcagaaaatctgtcacgctctgaagtattggcttggctgaaagaacacaagatggagaagaccaagcaattcgaactgctggatattagctggcttatcgaaagcatgaaagttggtaaaccggtggacaccaaggggaaataccagttggcggaatcggttgaggtgagtgcgaacccagatccgacagaaggtcgtgtaaacgagctgcctcctactatgaaaaccgtttctccgtatgcgtgtcaacgccgcaccaccctgaacaaccgtaatcaacgttttacggactcgctggagattcttcgtgaaatgtacgagctgaaaggcaacgacgatactgcgctgcgcatccgtcgtgctatctccgtgctgaaaagccttccgtttgaggtacgtagcctgaaagacacggaaggattgccctggatcagtgatgaagtcaaagggattatggaagaaatcatcgaagtcggggagtcgcgtgaagtgcaggccgtgctcaatgatgagtggtatcaaagcttccacgcatttacgcgtgtctttggagtgggggtgaagacagcagacaagtggtaccgtatgggtctgcgcaccctcgaggatgttcgttccagcaagaccctgaagttgaccccgtggcagaaagtaggtctgctgtattatgaagatcttgctcgcggcgttacgcgtgcggaagctgacgcgatttggctgctggttcaggatgcagtcgcaactttcgacccggatgcgatcgtggagattgtcggtggatttcgtcgtgggaaacctcagggtcacgacgttgatctgcttatcagttctccgggagctgaaaaagagcaagaagaccaactcctgcagaaagtgatgaatctgtggaagaaacaagggttgttgctgtgtggtcgtctggaatggagtcagtgggaatgggggggttcgccttccggtaaggctgatgagggtgacgcggaggcgtcgtgctttctgatcctcaaactttatgatcatctggtgcgcaaaagtaaacgcaatatgccgactggttcgaacatgggcgagtccaaaccgtggaaagcaattaaagtagatctgctgcgttgcccccgcggcagttttgcgtttgcgatgttgcagtggaccggaagccgcatgttccgtcgtgatctgcgcgactacgcccgcgaagagaagaacatgatgctggacaatcattcgctgtatgacatgactcgtggtatccaactccctgctaaatcggaagaggaaattttcgaacatctggggcttgaatacctggaaccgttcgaacgtaacgca

SEQ ID NO: 4608 - protein, 528 aa, synthetic construct
  REGION 1..528: note = Variant of terminal deoxynucleotidyltransferase
MHHHHHGGSGSHGIRTIDSDFGKKQQKKGDNHDSSATYEIKFHEFVLFILEEKMGATRRTFLTDLARKKGFRVENELTDEVTHIVAENLSRSEVLAWLKEHKMEKTKQFELLDISWLIESMKVGKPVDTKGKYQLAESVEVSANPDPTEGRVNELPPTMKTVSPYACQRRTTLNNRNQRFTDSLEILREMYELKGNDDTALRIRRAISVLKSLPFEVRSLKDTEGLPWISDEVKGIMEEIIEVGESREVQAVLNDEWYQSFHAFTRVFGVGVKTADKWYRMGLRTLEDVRSSKTLKLTPWQKVGLLYYEDLARGVTRAEADAIWLLVQDAVATFDPDAIVEIVGGFRRGKPQGHDVDLLISSPGAEKEQEDQLLQKVMNLWKKQGLLLCGRLEWSQWEWGGSPSGKADEGDAEASCFLILKLYDHLVRKSKRNMPTGSNMGESKPWKAIKVDLLRCPRGSFAFAMLQWTGSRMFRRDLRDYAREEKNMMLDNHSLYDMTRGIQLPAKSEEEIFEHLGLEYLEPFERNA

SEQ ID NO: 4609 - DNA, 1584 bp, synthetic construct
  misc_feature 1..1584: note = Variant of terminal deoxynucleotidyltransferase
  source 1..1584: mol_type = other DNA
atgcaccatcatcatcatggcggtagcggcagccacggcattcgtaccatcgattcggacttcgggaagaaacagcagaaaaaaggcgataaccacgatagttccgccacttatgaaatcaaatttcacgagtttgtgctgttcattctcgaagaaaaaatgggtgcgacgcgtcgtacttttctgacagatttagcccgcaagaaagggttccgcgtcgagaatgaactgaccgacgaagttacccacatcgtggcagaaaatctgtcacgctctgaagtattggcttggctgaaagaacacaagatggagaagaccaagcaattcgaactgctggatattagctggcttatcgaaagcatgaaagttggtaaaccggtggacaccaaggggaaataccagttggcggaatcggttgaggtgagtgcgaacccagatccgacagaaggtcgtgtaaacgagctgcctcctactatgaaaaccgtttctccgtatgcgtgtcaacgccgcaccaccctgaacaaccgtaatcaacgttttacggactcgctggagattcttcgtgaaatgtacgagctgaaaggcaacgacgatactgcgctgcgcatccgtcgtgctatctccgtgctgaaaagccttccgtttgaggtacgtagcctgaaagacacggaaggattgccctggatcagtgatgaagtcaaagggattatggaagaaatcatcgaagtcggggagtcgcgtgaagtgcaggccgtgctcaatgatgagtggtatcaaagcttccacgcatttacgcgtgtctttggagtgggggtgaagacagcagacaagtggtaccgtatgggtctgcgcaccctcgaggatgttcgttccagcaagaccctgaagttgaccccgtggcagaaagtaggtctgctgtattatgaagatcttgctcgcggcgttacgcgtgccgaagctgacgcgatttggctgctggttcaggatgcagtcgcaactttcgacccggatgcgatcgtggagattgtcggtggatttcgtcgtgggaaacctcagggtcacgacgttgatctgcttatcagttctccgggagctgaaaaagagcaagaagaccaactcctgcagaaagtgatgaatctgtggaagaaacaagggttgttgctgtgtggtcgtctggaatggagtcagtgggaatgggggaaactgggctccggtaaggctgatgagggtgacgcggaggcgtcgtgctttctgatcctcaaactttatgatcatctggtgcgcaaaagtaaacgcaatatgccgactggttcgaacatgggcgagtccaaaccgtggaaagcaattaaagtagatctgctgcgttgcccccgcggcagttttgcgtttgcgatgttgcagtggaccggaagccgcatgttccgtcgtgatctgcgcgattacgccctggaagagaagaacatgatgctggacaatcattcgctgtatgacatgactcgtggtatccaactccctgctaatagcgaagaggaaattttcgaacatctggggcttgaatacctggaaccgttcgaacgtaacgca

SEQ ID NO: 4610 - protein, 528 aa, synthetic construct
  REGION 1..528: note = Variant of terminal deoxynucleotidyltransferase
MHHHHHGGSGSHGIRTIDSDFGKKQQKKGDNHDSSATYEIKFHEFVLFILEEKMGATRRTFLTDLARKKGFRVENELTDEVTHIVAENLSRSEVLAWLKEHKMEKTKQFELLDISWLIESMKVGKPVDTKGKYQLAESVEVSANPDPTEGRVNELPPTMKTVSPYACQRRTTLNNRNQRFTDSLEILREMYELKGNDDTALRIRRAISVLKSLPFEVRSLKDTEGLPWISDEVKGIMEEIIEVGESREVQAVLNDEWYQSFHAFTRVFGVGVKTADKWYRMGLRTLEDVRSSKTLKLTPWQKVGLLYYEDLARGVTRAEADAIWLLVQDAVATFDPDAIVEIVGGFRRGKPQGHDVDLLISSPGAEKEQEDQLLQKVMNLWKKQGLLLCGRLEWSQWEWGKLGSGKADEGDAEASCFLILKLYDHLVRKSKRNMPTGSNMGESKPWKAIKVDLLRCPRGSFAFAMLQWTGSRMFRRDLRDYALEEKNMMLDNHSLYDMTRGIQLPANSEEEIFEHLGLEYLEPFERNA

SEQ ID NO: 4611 - DNA, 1584 bp, synthetic construct
  misc_feature 1..1584: note = Variant of terminal deoxynucleotidyltransferase
  source 1..1584: mol_type = other DNA
atgcaccatcatcatcatggcggtagcggcagccacggcattcgtaccatcgattcggacttcgggaagaaacagcagaaaaaaggcgataaccacgatagttccgccacttatgaaatcaaatttcacgagtttgtgctgttcattctcgaagaaaaaatgggtgcgacgcgtcgtacttttctgacagatttagcccgcaagaaagggttccgcgtcgagaatgaactgaccgacgaagttacccacatcgtggcagaaaatctgtcacgctctgaagtattggcttggctgaaagaacacaagatggagaagaccaagcaattcgaactgctggatattagctggcttatcgaaagcatgaaagttggtaaaccggtggacaccaaggggaaataccagttggcggaatcggttgaggtgagtgcgaacccagatccgacagaaggtcgtgtaaacgagctgcctcctactatgaaaaccgtttctccgtatgcgtgtcaacgccgcacctcgctgaacaaccgtaataagcgttttacggactcgctggagattcttcgtgaaatgtacgagctgaaaggcaacgacgatactgcgctgcgcatccgtcgtgctatctccgtgctgaaaagccttccgtttgaggtacgtagcctgaaagacacggaaggattgccctggatcagtgatgaagtcaaagggattatggaagaaatcatcgaagtcggggagtcgcgtgaagtgcaggccgtgctcaatgatgagtggtatcaaagcttccacgcatttacgcgtgtctttggagtgggggtgaagacagcagacaagtggtaccgtatgggtctgcgcaccctcgaggatgttcgttccagcaagaccctgaagttgaccccgtggcagaaagtaggtctgctgtattatgaagatcttgctcgcggcgttacgcgtgccgaagctgacgcgatttggctgctggttcaggatgcagtcgcaactttcgacccggatgcgatcgtggagattgtcggtggatttcgtcgtgggaaacctcagggtcacgacgttgatctgcttatcagttctccgggagctgaaaaagagcaagaagaccaactcctgcagaaagtgatgaatctgtggaagaaacaagggttgttgctgtgtggtcgtctggaatggagtcagtgggaatgggggggttcgccttccggtaaggctgatgagggtgacgcggaggcgtcgtgctttctgatcctcaaactttatgatcatctggtgcgcaaaagtaaacgcaatatgccgactggttcgaacatgggcgagtccaaaccgtggaaagcaattaaagtagatctgctgcgttgcccccgcggcagttttgcgtttgcgatgttgcagtggaccggaagccgcatgttccgtcgtgatctgcgcgattacgccctggaagagaagaacatgatgctggacaatcattcgctgtatgacatgactcgtggtatccaactccctgctaaatcggaagaggaaattttcgaacatctggggcttgaatacctggaaccgttcgaacgtaacgca

SEQ ID NO: 4612 - protein, 528 aa, synthetic construct
  REGION 1..528: note = Variant of terminal deoxynucleotidyltransferase
MHHHHHGGSGSHGIRTIDSDFGKKQQKKGDNHDSSATYEIKFHEFVLFILEEKMGATRRTFLTDLARKKGFRVENELTDEVTHIVAENLSRSEVLAWLKEHKMEKTKQFELLDISWLIESMKVGKPVDTKGKYQLAESVEVSANPDPTEGRVNELPPTMKTVSPYACQRRTSLNNRNKRFTDSLEILREMYELKGNDDTALRIRRAISVLKSLPFEVRSLKDTEGLPWISDEVKGIMEEIIEVGESREVQAVLNDEWYQSFHAFTRVFGVGVKTADKWYRMGLRTLEDVRSSKTLKLTPWQKVGLLYYEDLARGVTRAEADAIWLLVQDAVATFDPDAIVEIVGGFRRGKPQGHDVDLLISSPGAEKEQEDQLLQKVMNLWKKQGLLLCGRLEWSQWEWGGSPSGKADEGDAEASCFLILKLYDHLVRKSKRNMPTGSNMGESKPWKAIKVDLLRCPRGSFAFAMLQWTGSRMFRRDLRDYALEEKNMMLDNHSLYDMTRGIQLPAKSEEEIFEHLGLEYLEPFERNA

SEQ ID NO: 4613 - DNA, 1584 bp, synthetic construct
  misc_feature 1..1584: note = Variant of terminal deoxynucleotidyltransferase
  source 1..1584: mol_type = other DNA
atgcaccatcatcatcatggcggtagcggcagccacggcattcgtaccatcgattcggacttcgggaagaaacagcagaaaaaaggcgataaccacgatagttccgccacttatgaaatcaaatttcacgagtttgtgctgttcattctcgaagaaaaaatgggtgcgacgcgtcgtacttttctgacagatttagcccgcaagaaagggttccgcgtcgagaatgaactgaccgacgaagttacccacatcgtggcagaaaatctgtcacgctctgaagtattggcttggctgaaagaacacaagatggagaagaccaagcaattcgaactgctggatattagctggcttatcgaaagcatgaaagttggtaaaccggtggacaccaaggggaaataccagttggcggaatcggttgaggtgagtgcgaacccagatccgacagaaggtcgtgtaaacgagctgcctcctactatgaaaaccgtttctccgtatgcgtgtcaacgccgcaccaccctgaacaaccgtaatcaacgttttacggactcgctggagattcttcgtgaaatgtacgagctgaaaggcaacgacgatactgcgctgcgcatccgtcgtgctatctccgtgctgaaaagccttccgtttgaggtacgtagcctgaaagacacggaaggattgccctggatcagtgatgaagtcaaagggattatggaagaaatcatcgaagtcggggagtcgcgtgaagtgcaggccgtgctcaatgatgagtggtatcaaagcttccacgcatttacgcgtgtctttggagtgggggtgaagacagcagacaagtggtaccgtatgggtctgcgcaccctcgaggatgttcgttccagcaagaccctgaagttgaccccgtggcagaaagtaggtctgctgtattatgaagatcttgctcgcggcgttacgcgtgccgaagctgacgcgatttggctgctggttcaggatgcagtcgcaactttcgacccggatgcgatcgtagagattgtcggtggatttcgtcgtgggaaacctcagggtcacgacgttgatctgcttatcagttctccgggagctgaaaaagagcaagaagaccaactcctgcagaaagtgatgaatctgtggaagaaacaagggttgttgctggccggtcgtctggaagaaagtcagtgggaatgggggggttcgccttccggtaaggctgatgagggtgacgcggaggcgtcgtgctttctgatcctcaaactttatgatcatctggtgcgcaaaagtaaacgcaatatgccgactggttcgaacatgggcgagtccaaaccgtggaaagcaattaaagtagatctgctgcgttgcccccgcggcagttttgcgtttgcgatgttgcagtggaccggaagccgcatgttccgtcgtgatctgcgcgattacgccctggaagagaagaacatgatgctggacaatcattcgctgtatgacatgactcgtggtatccaactccctgctaaatcggaagaggaaattttcgaacatctggggcttgaatacctggaaccgttcgaacgtaacgca

SEQ ID NO: 4614 - protein, 528 aa, synthetic construct
  REGION 1..528: note = Variant of terminal deoxynucleotidyltransferase
MHHHHHGGSGSHGIRTIDSDFGKKQQKKGDNHDSSATYEIKFHEFVLFILEEKMGATRRTFLTDLARKKGFRVENELTDEVTHIVAENLSRSEVLAWLKEHKMEKTKQFELLDISWLIESMKVGKPVDTKGKYQLAESVEVSANPDPTEGRVNELPPTMKTVSPYACQRRTTLNNRNQRFTDSLEILREMYELKGNDDTALRIRRAISVLKSLPFEVRSLKDTEGLPWISDEVKGIMEEIIEVGESREVQAVLNDEWYQSFHAFTRVFGVGVKTADKWYRMGLRTLEDVRSSKTLKLTPWQKVGLLYYEDLARGVTRAEADAIWLLVQDAVATFDPDAIVEIVGGFRRGKPQGHDVDLLISSPGAEKEQEDQLLQKVMNLWKKQGLLLAGRLEESQWEWGGSPSGKADEGDAEASCFLILKLYDHLVRKSKRNMPTGSNMGESKPWKAIKVDLLRCPRGSFAFAMLQWTGSRMFRRDLRDYALEEKNMMLDNHSLYDMTRGIQLPAKSEEEIFEHLGLEYLEPFERNA

SEQ ID NO: 4615 - DNA, 1584 bp, synthetic construct
  misc_feature 1..1584: note = Variant of terminal deoxynucleotidyltransferase
  source 1..1584: mol_type = other DNA
atgcaccatcatcatcatggcggtagcggcagccacggcattcgtaccatcgattcggacttcgggaagaaacagcagaaaaaaggcgataaccacgatagttccgccacttatgaaatcaaatttcacgagtttgtgctgttcattctcgaagaaaaaatgggtgcgacgcgtcgtacttttctgacagatttagcccgcaagaaagggttccgcgtcgagaatgaactgaccgacgaagttacccacatcgtggcagaaaatctgtcacgctctgaagtattggcttggctgaaagaacacaagatggagaagaccaagcaattcgaactgctggatattagctggcttatcgaaagcatgaaagttggtaaaccggtggacaccaaggggaaataccagttggcggaatcggttgaggtgagtgcgaacccagatccgacagaaggtcgtgtaaacgagctgcctcctactatgaaaaccgtttctccgtatgcgtgtcaacgccgcaccaccctgaacaaccgtaatcaacgttttacggactcgctggagattcttcgtgaaatgtacgagctgaaaggcaacgacgatactgcgctgcgcatccgtcgtgctatctccgtgctgaaaagccttccgtttgaggtacgtagcctgaaagacacggaaggattgccctggatcagtgatgaagtcaaagggattatggaagaaatcatcgaagtcggggagtcgcgtgaagtgcaggccgtgctcaatgatgagtggtatcaaagcttccacgcatttacgcgtgtctttggagtgggggtgaagacagcagacaagtggtaccgtatgggtctgcgcaccctcgaggatgttcgttccagcaagaccctgaagttgaccccgtggcagaaagtaggtctgctgtattatgaagatcttgctcgcggcgttacgcgtgcggaagctgacgcgattttgctgctggttcaggatgcagtcgcaactttcgacccggatgcgatcgtggagattgtcggtggatttcgtcgtgggaaacctcagggtcacgacgttgatctgcttatcagttctccgggagctgaaaaagagcaagaagaccaactcctgcaaaaggtgatgactctgtggaagaaacaagggttgttgctgtgtggtcgtctggaatggagtcagtgggaatgggggggttcgccttccctgaaggctgatgagggtgacgcggaggcgtcgtgctttctgatcctcaaactttatgatcatctggtgcgcaaaagtaaacgcaatatgccgactggttcgaacatgggcgagtccaaaccgtggaaagcaattaaagtagatctgctgcgttgcccccgcggcagttttgcgtttgcgatgttgcagtggaccggaagccgcatgttccgtcgtgatctgcgcgactacgcccgcgaagagaagaacatgatgctggacaatcattcgctgtatgacatgactcgtggtatccaactccctgctaaatcggaagaggaaattttcgaacatctggggcttgaatacctggaaccgttcgaacgtaacgca

SEQ ID NO: 4616 - protein, 528 aa, synthetic construct
  REGION 1..528: note = Variant of terminal deoxynucleotidyltransferase
MHHHHHGGSGSHGIRTIDSDFGKKQQKKGDNHDSSATYEIKFHEFVLFILEEKMGATRRTFLTDLARKKGFRVENELTDEVTHIVAENLSRSEVLAWLKEHKMEKTKQFELLDISWLIESMKVGKPVDTKGKYQLAESVEVSANPDPTEGRVNELPPTMKTVSPYACQRRTTLNNRNQRFTDSLEILREMYELKGNDDTALRIRRAISVLKSLPFEVRSLKDTEGLPWISDEVKGIMEEIIEVGESREVQAVLNDEWYQSFHAFTRVFGVGVKTADKWYRMGLRTLEDVRSSKTLKLTPWQKVGLLYYEDLARGVTRAEADAILLLVQDAVATFDPDAIVEIVGGFRRGKPQGHDVDLLISSPGAEKEQEDQLLQKVMTLWKKQGLLLCGRLEWSQWEWGGSPSLKADEGDAEASCFLILKLYDHLVRKSKRNMPTGSNMGESKPWKAIKVDLLRCPRGSFAFAMLQWTGSRMFRRDLRDYAREEKNMMLDNHSLYDMTRGIQLPAKSEEEIFEHLGLEYLEPFERNA

SEQ ID NO: 4617 - DNA, 1584 bp, synthetic construct
  misc_feature 1..1584: note = Variant of terminal deoxynucleotidyltransferase
  source 1..1584: mol_type = other DNA
atgcaccatcatcatcatggcggtagcggcagccacggcattcgtaccatcgattcggacttcgggaagaaacagcagaaaaaaggcgataaccacgatagttccgccacttatgaaatcaaatttcacgagtttgtgctgttcattctcgaagaaaaaatgggtgcgacgcgtcgtacttttctgacagatttagcccgcaagaaagggttccgcgtcgagaatgaactgaccgacgaagttacccacatcgtggcagaaaatctgtcacgctctgaagtattggcttggctgaaagaacacaagatggagaagaccaagcaattcgaactgctggatattagctggcttatcgaaagcatgaaagttggtaaaccggtggacaccaaggggaaataccagttggcggaatcggttgaggtgagtgcgaacccagatccgacagaaggtcgtgtaaacgagctgcctcctactatgaaaaccgtttctccgtatgcgtgtcaacgccgcacctcgctgatgaaccgtaataagcgttttacggactcgctggagattcttcgtgaaatgtacgagctgaaaggcaacgacgatactgcgctgcgcatccgtcgtgctatctccgtgctgaaaagccttccgtttgaggtacgtagcctgaaagacacggaaggattgccctggatcagtgatgaagtcaaagggattatggaagaaatcatcgaagtcggggagtcgcgtgaagtgcaggccgtgctcaatgatgagtggtatcaaagcttccacgcatttacgcgtgtctttggagtgggggtgaagacagcagacaagtggtaccgtatgggtctgcgcaccctcgaggatgttcgttccagcaagaccctgaagttgaccccgtggcagaaagtaggtctgctgtattatgaagatcttgctcgcggcgttacgcgtgccgaagctgacgcgatttggctgctggttcaggatgcagtcgcaactttcgacccggatgcgatcgtggagattgtcggtggatttcgtcgtgggaaacctcagggtcacgacgttgatctgcttatcagttctccgggagctgaaaaagagcaagaagaccaactcctgcagaaagtgatgaatctgtggaagaaacaagggttgttgctgtgtggtcgtctggaatggagtcagtgggaatggggggggctgccatccggtaaggctgatgagggtgacgcggaggcgtcgtgctttctgatcctcaaactttatgatcatctggtgcgcaaaagtaaacgcaatatgccgactggttcgaacatgggcgagtccaaaccgtggaaagcaattaaagtagatctgctgcgttgcccccgcggcagttttgcgtttgcgatgttgcagtggaccggaagccgcatgttccgtcgtgatctgcgcgattacgccctggaagagaagaacatgatgctggacaatcattcgctgtatgacatgacccgcggtatccaactccctgctaaacgcgaagaggaaattttcgaacatctggggcttgaatacctggaaccgttcgaacgtaacgca

SEQ ID NO: 4618 - protein, 528 aa, synthetic construct
  REGION 1..528: note = Variant of terminal deoxynucleotidyltransferase
MHHHHHGGSGSHGIRTIDSDFGKKQQKKGDNHDSSATYEIKFHEFVLFILEEKMGATRRTFLTDLARKKGFRVENELTDEVTHIVAENLSRSEVLAWLKEHKMEKTKQFELLDISWLIESMKVGKPVDTKGKYQLAESVEVSANPDPTEGRVNELPPTMKTVSPYACQRRTSLMNRNKRFTDSLEILREMYELKGNDDTALRIRRAISVLKSLPFEVRSLKDTEGLPWISDEVKGIMEEIIEVGESREVQAVLNDEWYQSFHAFTRVFGVGVKTADKWYRMGLRTLEDVRSSKTLKLTPWQKVGLLYYEDLARGVTRAEADAIWLLVQDAVATFDPDAIVEIVGGFRRGKPQGHDVDLLISSPGAEKEQEDQLLQKVMNLWKKQGLLLCGRLEWSQWEWGGLPSGKADEGDAEASCFLILKLYDHLVRKSKRNMPTGSNMGESKPWKAIKVDLLRCPRGSFAFAMLQWTGSRMFRRDLRDYALEEKNMMLDNHSLYDMTRGIQLPAKREEEIFEHLGLEYLEPFERNA

SEQ ID NO: 4619 - DNA, 1584 bp, synthetic construct
  misc_feature 1..1584: note = Variant of terminal deoxynucleotidyltransferase
  source 1..1584: mol_type = other DNA
atgcaccatcatcatcatggcggtagcggcagccacggcattcgtaccatcgattcggacttcgggaagaaacagcagaaaaaaggcgataaccacgatagttccgccacttatgaaatcaaatttcacgagtttgtgctgttcattctcgaagaaaaaatgggtgcgacgcgtcgtacttttctgacagatttagcccgcaagaaagggttccgcgtcgagaatgaactgaccgacgaagttacccacatcgtggcagaaaatctgtcacgctctgaagtattggcttggctgaaagaacacaagatggagaagaccaagcaattcgaactgctggatattagctggcttatcgaaagcatgaaagttggtaaaccggtggacaccaaggggaaataccagttggcggaatcggttgaggtgagtgcgaacccagatccgacagaaggtcgtgtaaacgagctgcctcctactatgaaaaccgtttctccgtatgcgtgtcaacgccgcaccacgctgaacaaccgtaataagcgttttacggactcgctggagattcttcgtgaaatgtacgagctgaaaggcaacgacgatactgcgctgcgcatccgtcgtgctatctccgtgctgaaaagccttccgtttgaggtacgtagcctgaaagacacggaaggattgccctggatcagtgatgaagtcaaagggattatggaagaaatcatcgaagtcggggagtcgcgtgaagtgcaggccgtgctcaatgatgagtggtatcaaagcttccacgcatttacgcgtgtctttggagtgggggtgaagacagcagacaagtggtaccgtatgggtctgcgcaccctcgaggatgttcgttccagcaagaccctgaagttgaccccgtggcagaaagtaggtctgctgtattatgaagatcttgctcgcggcgttacgcgtgccgaagctgacgcgatttggctgctggttcaggatgcagtcgcaactttcgacccggatgcgatcgtggagattgtcggtggatttcgtcgtgggaaacctcagggtcacgacgttgatctgcttatcagttctccgggagctgaaaaagagcaagaagaccaactcctgcagaaagtgatgaatctgtggaagaaacaagggttgttgctgtgtggtcgtctggaatggagtcagtgggaatggggggggctgggctccggtaaggctgatgagggtgacgcggaggcgtcgtgctttctgatcctcaaactttatgatcatctggtgcgcaaaagtaaacgcaatatgccgactggttcgaacatgggcgagtccaaaccgtggaaagcaattaaagtagatctgctgcgttgcccccgcggcagttttgcgtttgcgatgttgcagtggaccggaagccgcatgttccgtcgtgatctgcgcgattacgccctggaagagaagaacatgatgctggacaatcattcgctgtatgacatgactcgtggtatccaactccctgctaaatcggaagaggaaattttcgaacatctggggcttgaatacctggaaccgttcgaacgtaacgca

SEQ ID NO: 4620 - protein, 528 aa, synthetic construct
  REGION 1..528: note = Variant of terminal deoxynucleotidyltransferase
MHHHHHGGSGSHGIRTIDSDFGKKQQKKGDNHDSSATYEIKFHEFVLFILEEKMGATRRTFLTDLARKKGFRVENELTDEVTHIVAENLSRSEVLAWLKEHKMEKTKQFELLDISWLIESMKVGKPVDTKGKYQLAESVEVSANPDPTEGRVNELPPTMKTVSPYACQRRTTLNNRNKRFTDSLEILREMYELKGNDDTALRIRRAISVLKSLPFEVRSLKDTEGLPWISDEVKGIMEEIIEVGESREVQAVLNDEWYQSFHAFTRVFGVGVKTADKWYRMGLRTLEDVRSSKTLKLTPWQKVGLLYYEDLARGVTRAEADAIWLLVQDAVATFDPDAIVEIVGGFRRGKPQGHDVDLLISSPGAEKEQEDQLLQKVMNLWKKQGLLLCGRLEWSQWEWGGLGSGKADEGDAEASCFLILKLYDHLVRKSKRNMPTGSNMGESKPWKAIKVDLLRCPRGSFAFAMLQWTGSRMFRRDLRDYALEEKNMMLDNHSLYDMTRGIQLPAKSEEEIFEHLGLEYLEPFERNA

SEQ ID NO: 4621 - DNA, 1584 bp, synthetic construct
  misc_feature 1..1584: note = Variant of terminal deoxynucleotidyltransferase
  source 1..1584: mol_type = other DNA
atgcaccatcatcatcatggcggtagcggcagccacggcattcgtaccatcgattcggacttcgggaagaaacagcagaaaaaaggcgataaccacgatagttccgccacttatgaaatcaaatttcacgagtttgtgctgttcattctcgaagaaaaaatgggtgcgacgcgtcgtacttttctgacagatttagcccgcaagaaagggttccgcgtcgagaatgaactgaccgacgaagttacccacatcgtggcagaaaatctgtcacgctctgaagtattggcttggctgaaagaacacaagatggagaagaccaagcaattcgaactgctggatattagctggcttatcgaaagcatgaaagttggtaaaccggtggacaccaaggggaaataccagttggcggaatcggttgaggtgagtgcgaacccagatccgacagaaggtcgtgtaaacgagctgcctcctactatgaaaaccgtttctccgtatgcgtgtcaacgccgcacctcgctgatgaaccgtaatcagcgttttacggactcgctggagattcttcgtgaaatgtacgagctgaaaggcaacgacgatactgcgctgcgcatccgtcgtgctatctccgtgctgaaaagccttccgtttgaggtacgtagcctgaaagacacggaaggattgccctggatcagtgatgaagtcaaagggattatggaagaaatcatcgaagtcggggagtcgcgtgaagtgcaggccgtgctcaatgatgagtggtatcaaagcttccacgcatttacgcgtgtctttggagtgggggtgaagacagcagacaagtggtaccgtatgggtctgcgcaccctcgaggatgttcgttccagcaagaccctgaagttgaccccgtggcagaaagtaggtctgctgtattatgaagatcttgctcgcggcgttacgcgtgccgaagctgacgcgatttggctgctggttcaggatgcagtcgcaactttcgacccggatgcgatcgtggagattgtcggtggatttcgtcgtgggaaacctcagggtcacgacgttgatctgcttatcagttctccgggagctgaaaaagagcaagaagaccaactcctgcagaaagtgatgaatctgtggaagaaacaagggttgttgctgtgtggtcgtctggaatggagtcagtgggaatgggggaaaagtggctccggtaaggctgatgagggtgacgcggaggcgtcgtgctttctgatcctcaaactttatgatcatctggtgcgcaaaagtaaacgcaatatgccgactggttcgaacatgggcgagtccaaaccgtggaaagcaattaaagtagatctgctgcgttgcccccgcggcagttttgcgtttgcgatgttgcagtggaccggaagccgcatgttccgtcgtgatctgcgcgattacgccctggaagagaagaacatgatgctggacaatcattcgctgtatgacatgactcgtggtatccaactccctgctcgtagcgaagaggaaattttcgaacatctggggcttgaatacctggaaccgttcgaacgtaacgca

SEQ ID NO: 4622 - protein, 528 aa, synthetic construct
  REGION 1..528: note = Variant of terminal deoxynucleotidyltransferase
MHHHHHGGSGSHGIRTIDSDFGKKQQKKGDNHDSSATYEIKFHEFVLFILEEKMGATRRTFLTDLARKKGFRVENELTDEVTHIVAENLSRSEVLAWLKEHKMEKTKQFELLDISWLIESMKVGKPVDTKGKYQLAESVEVSANPDPTEGRVNELPPTMKTVSPYACQRRTSLMNRNQRFTDSLEILREMYELKGNDDTALRIRRAISVLKSLPFEVRSLKDTEGLPWISDEVKGIMEEIIEVGESREVQAVLNDEWYQSFHAFTRVFGVGVKTADKWYRMGLRTLEDVRSSKTLKLTPWQKVGLLYYEDLARGVTRAEADAIWLLVQDAVATFDPDAIVEIVGGFRRGKPQGHDVDLLISSPGAEKEQEDQLLQKVMNLWKKQGLLLCGRLEWSQWEWGKSGSGKADEGDAEASCFLILKLYDHLVRKSKRNMPTGSNMGESKPWKAIKVDLLRCPRGSFAFAMLQWTGSRMFRRDLRDYALEEKNMMLDNHSLYDMTRGIQLPARSEEEIFEHLGLEYLEPFERNA

SEQ ID NO: 4623 - DNA, 1584 bp, synthetic construct
  misc_feature 1..1584: note = Variant of terminal deoxynucleotidyltransferase
  source 1..1584: mol_type = other DNA
atgcaccatcatcatcatggcggtagcggcagccacggcattcgtaccatcgattcggacttcgggaagaaacagcagaaaaaaggcgataaccacgatagttccgccacttatgaaatcaaatttcacgagtttgtgctgttcattctcgaagaaaaaatgggtgcgacgcgtcgtacttttctgacagatttagcccgcaagaaagggttccgcgtcgagaatgaactgaccgacgaagttacccacatcgtggcagaaaatctgtcacgctctgaagtattggcttggctgaaagaacacaagatggagaagaccaagcaattcgaactgctggatattagctggcttatcgaaagcatgaaagttggtaaaccggtggacaccaaggggaaataccagttggcggaatcggttgaggtgagtgcgaacccagatccgacagaaggtcgtgtaaacgagctgcctcctactatgaaaaccgtttctccgtatgcgtgtcaacgccgcaccaccctgaacaaccgtaatcaacgttttacggactcgctggagattcttcgtgaaatgtacgagctgaaaggcaacgacgatactgcgctgcgcatccgtcgtgctatctccgtgctgaaaagccttccgtttgaggtacgtagcctgaaagacacggaaggattgccctggatcagtgatgaagtcaaagggattatggaagaaatcatcgaagtcggggagtcgcgtgaagtgcaggccgtgctcaatgatgagtggtatcaaagcttccacgcatttacgcgtgtctttggagtgggggtgaagacagcagacaagtggtaccgtatgggtctgcgcaccctcgaggatgttcgttccagcaagaccctgaagttgaccccgtggcagaaagtaggtctgctgtattatgaagatcttgctcgcggcgttacgcgtgccgaagctgacgcgatttggctgctggttcaggatgcagtcgcaactttcgacccggatgcgatctgtgagattgtcggtggatttcgtcgtgggaaacctcagggtcacgacgttgatctgcttatcagttctccgggagctgagaaagagcaagaagaccaactcctgcagaaagtgatgaatctgtggaagaaacaagggttgttgctgtgtggtcgtctggaatggagtcagtgggaatgggggggttcgccttccggtaaggctgatgagggtgacgcggaggcgtcgtgctttctgatcctcaaactttatgatcatctggtgcgcaaaagtaaacgcaatatgccgactggttcgaacatgggcgagtccaaaccgtggaaagcaattaaagtagatctgctgcgttgcccccgcggcagttttgcgtttgcgatgttgcagtggaccggaagccgcatgttccgtcgtgatctgcgcgattacgccctggaagagaagaacatgatgctggacaatcattcgctgtatgacatgactcgtggtatccaactccctgctaaatcggaagaggaaattttcgaacatctggggcttgaatacctggaaccgttcgaacgtaacgca

SEQ ID NO: 4624 - protein, 528 aa, synthetic construct
  REGION 1..528: note = Variant of terminal deoxynucleotidyltransferase
MHHHHHGGSGSHGIRTIDSDFGKKQQKKGDNHDSSATYEIKFHEFVLFILEEKMGATRRTFLTDLARKKGFRVENELTDEVTHIVAENLSRSEVLAWLKEHKMEKTKQFELLDISWLIESMKVGKPVDTKGKYQLAESVEVSANPDPTEGRVNELPPTMKTVSPYACQRRTTLNNRNQRFTDSLEILREMYELKGNDDTALRIRRAISVLKSLPFEVRSLKDTEGLPWISDEVKGIMEEIIEVGESREVQAVLNDEWYQSFHAFTRVFGVGVKTADKWYRMGLRTLEDVRSSKTLKLTPWQKVGLLYYEDLARGVTRAEADAIWLLVQDAVATFDPDAICEIVGGFRRGKPQGHDVDLLISSPGAEKEQEDQLLQKVMNLWKKQGLLLCGRLEWSQWEWGGSPSGKADEGDAEASCFLILKLYDHLVRKSKRNMPTGSNMGESKPWKAIKVDLLRCPRGSFAFAMLQWTGSRMFRRDLRDYALEEKNMMLDNHSLYDMTRGIQLPAKSEEEIFEHLGLEYLEPFERNA

SEQ ID NO: 4625 - DNA, 1584 bp, synthetic construct
  misc_feature 1..1584: note = Variant of terminal deoxynucleotidyltransferase
  source 1..1584: mol_type = other DNA
atgcaccatcatcatcatggcggtagcggcagccacggcattcgtaccatcgattcggacttcgggaagaaacagcagaaaaaaggcgataaccacgatagttccgccacttatgaaatcaaatttcacgagtttgtgctgttcattctcgaagaaaaaatgggtgcgacgcgtcgtacttttctgacagatttagcccgcaagaaagggttccgcgtcgagaatgaactgaccgacgaagttacccacatcgtggcagaaaatctgtcacgctctgaagtattggcttggctgaaagaacacaagatggagaagaccaagcaattcgaactgctggatattagctggcttatcgaaagcatgaaagttggtaaaccggtggacaccaaggggaaataccagttggcggaatcggttgaggtgagtgcgaacccagatccgacagaaggtcgtgtaaacgagctgcctcctactatgaaaaccgtttctccgtatgcgtgtcaacgccgcaccaccctgaacaaccgtaatcaacgttttacggactcgctggagattcttcgtgaaatgtacgagctgaaaggcaacgacgatactgcgctgcgcatccgtcgtgctatctccgtgctgaaaagccttccgtttgaggtacgtagcctgaaagacacggaaggattgccctggatcagtgatgaagtcaaagggattatggaagaaatcatcgaagtcggggagtcgcgtgaagtgcaggccgtgctcaatgatgagtggtatcaaagcttccacgcatttacgcgtgtctttggagtgggggtgaagacagcagacaagtggtaccgtatgggtctgcgcaccctcgaggatgttcgttccagcaagaccctgaagttgaccccgtggcagaaagtaggtctgctgtattatgaagatcttgctcgcggcgttacgcgtgccgaagctgacgcgatttggctgctggttcaggatgcagtcgcaactttcgacccggatgcgatcgtagagattgtcggtggatttcgtcgtgggaaacctcagggtcacgacgttgatctgcttatcagttctccgggatttgagcgcgagcaagaagaccaactcctgcagaaagtgatgaatctgtggaagaaacaagggttgttgctgtgcggtcgtctggaatggagtcagtgggaatgggggggttcgccttccggtaaggctgatgagggtgacgcggaggcgtcgtgctttctgatcctcaaactttatgatcatctggtgtgcaaaagtaaacgcaatatgccgactggttcgaacatgggcgagtccaaaccgtggaaagcaattaaagtagatctgctgcgttgcccccgcggcagttttgcgtttgcgatgttgcagtggaccggaagccgcatgttccgtcgtgatctgcgcgattacgccctggaagagaagaacatgatgctggacaatcattcgctgtatgacatgactcgtggtatccaactccctgctaaatcggaagaggaaattttcgaacatctggggcttgaatacctggaaccgttcgaacgtaacgca

SEQ ID NO: 4626 - protein, 528 aa, synthetic construct
  REGION 1..528: note = Variant of terminal deoxynucleotidyltransferase
MHHHHHGGSGSHGIRTIDSDFGKKQQKKGDNHDSSATYEIKFHEFVLFILEEKMGATRRTFLTDLARKKGFRVENELTDEVTHIVAENLSRSEVLAWLKEHKMEKTKQFELLDISWLIESMKVGKPVDTKGKYQLAESVEVSANPDPTEGRVNELPPTMKTVSPYACQRRTTLNNRNQRFTDSLEILREMYELKGNDDTALRIRRAISVLKSLPFEVRSLKDTEGLPWISDEVKGIMEEIIEVGESREVQAVLNDEWYQSFHAFTRVFGVGVKTADKWYRMGLRTLEDVRSSKTLKLTPWQKVGLLYYEDLARGVTRAEADAIWLLVQDAVATFDPDAIVEIVGGFRRGKPQGHDVDLLISSPGFEREQEDQLLQKVMNLWKKQGLLLCGRLEWSQWEWGGSPSGKADEGDAEASCFLILKLYDHLVCKSKRNMPTGSNMGESKPWKAIKVDLLRCPRGSFAFAMLQWTGSRMFRRDLRDYALEEKNMMLDNHSLYDMTRGIQLPAKSEEEIFEHLGLEYLEPFERNA

SEQ ID NO: 4627 - DNA, 1584 bp, synthetic construct
  misc_feature 1..1584: note = Variant of terminal deoxynucleotidyltransferase
  source 1..1584: mol_type = other DNA
atgcaccatcatcatcatggcggtagcggcagccacggcattcgtaccatcgattcggacttcgggaagaaacagcagaaaaaaggcgataaccacgatagttccgccacttatgaaatcaaatttcacgagtttgtgctgttcattctcgaagaaaaaatgggtgcgacgcgtcgtacttttctgacagatttagcccgcaagaaagggttccgcgtcgagaatgaactgaccgacgaagttacccacatcgtggcagaaaatctgtcacgctctgaagtattggcttggctgaaagaacacaagatggagaagaccaagcaattcgaactgctggatattagctggcttatcgaaagcatgaaagttggtaaaccggtggacaccaaggggaaataccagttggcggaatcggttgaggtgagtgcgaacccagatccgacagaaggtcgtgtaaacgagctgcctcctactatgaaaaccgtttctccgtatgcgtgtcaacgccgcaccaccctgaacaaccgtaatcaacgttttacggactcgctggagattcttcgtgaaatgtacgagctgaaaggcaacgacgatactgcgctgcgcatccgtcgtgctatctccgtgctgaaaagccttccgtttgaggtacgtagcctgaaagacacggaaggattgccctggatcagtgatgaagtcaaagggattatggaagaaatcatcgaagtcggggagtcgcgtgaagtgcaggccgtgctcaatgatgagtggtatcaaagcttccacgcatttacgcgtgtctttggagtgggggtgaagacagcagacaagtggtaccgtatgggtctgcgcaccctcgaggatgttcgttccagcaagaccctgaagttgaccccgtggcagaaagtaggtctgctgtattatgaagatcttgctcgcggcgttacgcgtgccgaagctgacgcgatttggctgctggttcaggatgcagtcgcaactttcgacccggatgcgatcgtagagattgtcggtggatttcgtcgtgggaaacctcagggtcacgacgttgatctgcttatcagttctccgggacacgagaaagagcaagaagaccaactcctgcagaaagtgatgaatctgtggaagaaacaagggttgttgctggccggtcgtctggaagaaagtcagtgggaatgggggggttcgccttccggtaaggctgatgagggtgacgcggaggcgtcgtgctttctgatcctcaaactttatgatcatctggtgcgcaaaagtaaacgcaatatgccgactggttcgaacatgggcgagtccaaaccgtggaaagcaattaaagtagatctgctgcgttgcccccgcggcagttttgcgtttgcgatgttgcagtggaccggaagccgcatgttccgtcgtgatctgcgcgattacgccctggaagagaagaacatgatgctggacaatcattcgctgtatgacatgactcgtggtatccaactccctgctaaatcggaagaggaaattttcgaacatctggggcttgaatacctggaaccgttcgaacgtaacgca

SEQ ID NO: 4628 - protein, 528 aa, synthetic construct
  REGION 1..528: note = Variant of terminal deoxynucleotidyltransferase
MHHHHHGGSGSHGIRTIDSDFGKKQQKKGDNHDSSATYEIKFHEFVLFILEEKMGATRRTFLTDLARKKGFRVENELTDEVTHIVAENLSRSEVLAWLKEHKMEKTKQFELLDISWLIESMKVGKPVDTKGKYQLAESVEVSANPDPTEGRVNELPPTMKTVSPYACQRRTTLNNRNQRFTDSLEILREMYELKGNDDTALRIRRAISVLKSLPFEVRSLKDTEGLPWISDEVKGIMEEIIEVGESREVQAVLNDEWYQSFHAFTRVFGVGVKTADKWYRMGLRTLEDVRSSKTLKLTPWQKVGLLYYEDLARGVTRAEADAIWLLVQDAVATFDPDAIVEIVGGFRRGKPQGHDVDLLISSPGHEKEQEDQLLQKVMNLWKKQGLLLAGRLEESQWEWGGSPSGKADEGDAEASCFLILKLYDHLVRKSKRNMPTGSNMGESKPWKAIKVDLLRCPRGSFAFAMLQWTGSRMFRRDLRDYALEEKNMMLDNHSLYDMTRGIQLPAKSEEEIFEHLGLEYLEPFERNA

SEQ ID NO: 4629 - DNA, 1584 bp, synthetic construct
  misc_feature 1..1584: note = Variant of terminal deoxynucleotidyltransferase
  source 1..1584: mol_type = other DNA
atgcaccatcatcatcatggcggtagcggcagccacggcattcgtaccatcgattcggacttcgggaagaaacagcagaaaaaaggcgataaccacgatagttccgccacttatgaaatcaaatttcacgagtttgtgctgttcattctcgaagaaaaaatgggtgcgacgcgtcgtacttttctgacagatttagcccgcaagaaagggttccgcgtcgagaatgaactgaccgacgaagttacccacatcgtggcagaaaatctgtcacgctctgaagtattggcttggctgaaagaacacaagatggagaagaccaagcaattcgaactgctggatattagctggcttatcgaaagcatgaaagttggtaaaccggtggacaccaaggggaaataccagttggcggaatcggttgaggtgagtgcgaacccagatccgacagaaggtcgtgtaaacgagctgcctcctactatgaaaaccgtttctccgtatgcgtgtcaacgccgcaccaccctgaacaaccgtaatcaacgttttacggactcgctggagattcttcgtgaaatgtacgagctgaaaggcaacgacgatactgcgctgcgcatccgtcgtgctatctccgtgctgaaaagccttccgtttgaggtacgtagcctgaaagacacggaaggattgccctggatcagtgatgaagtcaaagggattatggaagaaatcatcgaagtcggggagtcgcgtgaagtgcaggccgtgctcaatgatgagtggtatcaaagcttccacgcatttacgcgtgtctttggagtgggggtgaagacagcagacaagtggtaccgtatgggtctgcgcaccctcgaggatgttcgttccagcaagaccctgaagttgaccccgtggcagaaagtaggtctgctgtattatgaagatcttgctcgcggcgttacgcgtgcggaagctgacgcgatttggctgctggttcaggatgcagtcgcaactttcgacccggatgcgatcgtggagattgtcggtggatttcgtcgtgggaaacctcagggtcacgacgttgatctgcttatcagttctccgggagctgaaaaagagcaagaagaccaactcctgggccatgtgatgaatctgtggaagaaacaagggttgttgctgtgtggtcgtctggaatggagtcagtgggaatgggggggttcgccttccggtaaggctgatgagggtgacgcggaggcgtcgtgctttctgatcctcaaactttatgatcatctggtgcgcaaaagtaaacgcaatatgccgactggttcgaacatgggcgagtccaaaccgtggaaagcaattaaagtagatctgctgcgttgcccccgcggcagttttgcgtttgcgatgttgcagtggaccggaagccgcatgttccgtcgtgatctgcgcgactacgccctggaagagaagaacatgatgctggacaatcattcgctgtatgacatgactcgtggtatccaactccctgctaaatcggaagaggaaattttcgaacatctggggcttgaatacctggaaccgttcgaacgtaacgca

SEQ ID NO: 4630 - protein, 528 aa, synthetic construct
  REGION 1..528: note = Variant of terminal deoxynucleotidyltransferase
MHHHHHGGSGSHGIRTIDSDFGKKQQKKGDNHDSSATYEIKFHEFVLFILEEKMGATRRTFLTDLARKKGFRVENELTDEVTHIVAENLSRSEVLAWLKEHKMEKTKQFELLDISWLIESMKVGKPVDTKGKYQLAESVEVSANPDPTEGRVNELPPTMKTVSPYACQRRTTLNNRNQRFTDSLEILREMYELKGNDDTALRIRRAISVLKSLPFEVRSLKDTEGLPWISDEVKGIMEEIIEVGESREVQAVLNDEWYQSFHAFTRVFGVGVKTADKWYRMGLRTLEDVRSSKTLKLTPWQKVGLLYYEDLARGVTRAEADAIWLLVQDAVATFDPDAIVEIVGGFRRGKPQGHDVDLLISSPGAEKEQEDQLLGHVMNLWKKQGLLLCGRLEWSQWEWGGSPSGKADEGDAEASCFLILKLYDHLVRKSKRNMPTGSNMGESKPWKAIKVDLLRCPRGSFAFAMLQWTGSRMFRRDLRDYALEEKNMMLDNHSLYDMTRGIQLPAKSEEEIFEHLGLEYLEPFERNA

SEQ ID NO: 4631 - DNA, 1584 bp, synthetic construct
  misc_feature 1..1584: note = Variant of terminal deoxynucleotidyltransferase
  source 1..1584: mol_type = other DNA
atgcaccatcatcatcatggcggtagcggcagccacggcattcgtaccatcgattcggacttcgggaagaaacagcagaaaaaaggcgataaccacgatagttccgccacttatgaaatcaaatttcacgagtttgtgctgttcattctcgaagaaaaaatgggtgcgacgcgtcgtacttttctgacagatttagcccgcaagaaagggttccgcgtcgagaatgaactgaccgacgaagttacccacatcgtggcagaaaatctgtcacgctctgaagtattggcttggctgaaagaacacaagatggagaagaccaagcaattcgaactgctggatattagctggcttatcgaaagcatgaaagttggtaaaccggtggacaccaaggggaaataccagttggcggaatcggttgaggtgagtgcgaacccagatccgacagaaggtcgtgtaaacgagctgcctcctactatgaaaaccgtttctccgtatgcgtgtcaacgccgcaccaccctgaacaaccgtaatcaacgttttacggactcgctggagattcttcgtgaaatgtacgagctgaaaggcaacgacgatactgcgctgcgcatccgtcgtgctatctccgtgctgaaaagccttccgtttgaggtacgtagcctgaaagacacggaaggattgccctggatcagtgatgaagtcaaagggattatggaagaaatcatcgaagtcggggagtcgcgtgaagtgcaggccgtgctcaatgatgagtggtatcaaagcttccacgcatttacgcgtgtctttggagtgggggtgaagacagcagacaagtggtaccgtatgggtctgcgcaccctcgaggatgttcgttccagcaagaccctgaagttgaccccgtggcagaaagtaggtctgctgtattatgaagatcttgctcgcggcgttacgcgtgccgaagctgacgcgatttggctgctggttcaggatgcagtcgcaactttcgacccggatgcgatcgtagagattgtcggtggatttcgtcgtgggaaacctcagggtcacgacgttgatctgcttatcagttctccgggatttgagaaagagcaagaagaccaactcctgcagaaagtgatgaatctgtggaagaaacaagggttgttgctgtgcggtcgtctggaatggagtcagtgggaatgggggggttcgccttccggtaaggctgatgagggtgacgcggaggcgtcgtgctttctgatcctcaaactttatgatcatctggtgcgcaaaagtaaacgcaatatgccgactggttcgaacatgggcgagtccaaaccgtggaaagcaattaaagtagatctgctgcgttgcccccgcggcagttttgcgtttgcgatgttgcagtggaccggaagccgcatgttccgtcgtgatctgcgcgattacgccctggaagagaagaacatgatgctggacaatcattcgctgtatgacatgactcgtggtatccaactccctgctaaatcggaagaggaaattttcgaacatctggggcttgaatacctggaaccgttcgaacgtaacgca

SEQ ID NO: 4632 - protein, 528 aa, synthetic construct
  REGION 1..528: note = Variant of terminal deoxynucleotidyltransferase
MHHHHHGGSGSHGIRTIDSDFGKKQQKKGDNHDSSATYEIKFHEFVLFILEEKMGATRRTFLTDLARKKGFRVENELTDEVTHIVAENLSRSEVLAWLKEHKMEKTKQFELLDISWLIESMKVGKPVDTKGKYQLAESVEVSANPDPTEGRVNELPPTMKTVSPYACQRRTTLNNRNQRFTDSLEILREMYELKGNDDTALRIRRAISVLKSLPFEVRSLKDTEGLPWISDEVKGIMEEIIEVGESREVQAVLNDEWYQSFHAFTRVFGVGVKTADKWYRMGLRTLEDVRSSKTLKLTPWQKVGLLYYEDLARGVTRAEADAIWLLVQDAVATFDPDAIVEIVGGFRRGKPQGHDVDLLISSPGFEKEQEDQLLQKVMNLWKKQGLLLCGRLEWSQWEWGGSPSGKADEGDAEASCFLILKLYDHLVRKSKRNMPTGSNMGESKPWKAIKVDLLRCPRGSFAFAMLQWTGSRMFRRDLRDYALEEKNMMLDNHSLYDMTRGIQLPAKSEEEIFEHLGLEYLEPFERNA

SEQ ID NO: 4633 - DNA, 1584 bp, synthetic construct
  misc_feature 1..1584: note = Variant of terminal deoxynucleotidyltransferase
  source 1..1584: mol_type = other DNA
atgcaccatcatcatcatggcggtagcggcagccacggcattcgtaccatcgattcggacttcgggaagaaacagcagaaaaaaggcgataaccacgatagttccgccacttatgaaatcaaatttcacgagtttgtgctgttcattctcgaagaaaaaatgggtgcgacgcgtcgtacttttctgacagatttagcccgcaagaaagggttccgcgtcgagaatgaactgaccgacgaagttacccacatcgtggcagaaaatctgtcacgctctgaagtattggcttggctgaaagaacacaagatggagaagaccaagcaattcgaactgctggatattagctggcttatcgaaagcatgaaagttggtaaaccggtggacaccaaggggaaataccagttggcggaatcggttgaggtgagtgcgaacccagatccgacagaaggtcgtgtaaacgagctgcctcctactatgaaaaccgtttctccgtatgcgtgtcaacgccgcaccaccctgaacaaccgtaatcaacgttttacggactcgctggagattcttcgtgaaatgtacgagctgaaaggcaacgacgatactgcgctgcgcatccgtcgtgctatctccgtgctgaaaagccttccgtttgaggtacgtagcctgaaagacacggaaggattgccctggatcagtgatgaagtcaaagggattatggaagaaatcatcgaagtcggggagtcgcgtgaagtgcaggccgtgctcaatgatgagtggtatcaaagcttccacgcatttacgcgtgtctttggagtgggggtgaagacagcagacaagtggtaccgtatgggtctgcgcaccctcgaggatgttcgttccagcaagaccctgaagttgaccccgtggcagaaagtaggtctgctgtattatgaagatcttgctcgcggcgttacgcgtgcggaagctgacgcgatttggctgctggttcaggatgcagtcgcaactttcgacccggatgcgatcgtggagattgtcggtggatttcgtcgtgggaaacctcagggtcacgacgttgatctgcttatcagttctccgggagctgaaaaagagcaagaagaccaactcctgggcaaggtgatgaatgtgtggaagaaacaagggttgttgctgtgtggtcgtctggaatggagtcagtgggaatgggggggttcgccttccggtaaggctgatgagggtgacgcggaggcgtcgtgctttctgatcctcaaactttatgatcatctggtgcgcaaaagtaaacgcaatatgccgactggttcgaacatgggcgagtccaaaccgtggaaagcaattaaagtagatctgctgcgttgcccccgcggcagttttgcgtttgcgatgttgcagtggaccggaagccgcatgttccgtcgtgatctgcgcgactacgcccgcgaagagaagaacatgatgctggacaatcattcgctgtatgacatgactcgtggtatccaactccctgctaaatcggaagaggaaattttcgaacatctggggcttgaatacctggaaccgttcgaacgtaacgca

SEQ ID NO: 4634 - protein, 528 aa, synthetic construct
  REGION 1..528: note = Variant of terminal deoxynucleotidyltransferase
MHHHHHGGSGSHGIRTIDSDFGKKQQKKGDNHDSSATYEIKFHEFVLFILEEKMGATRRTFLTDLARKKGFRVENELTDEVTHIVAENLSRSEVLAWLKEHKMEKTKQFELLDISWLIESMKVGKPVDTKGKYQLAESVEVSANPDPTEGRVNELPPTMKTVSPYACQRRTTLNNRNQRFTDSLEILREMYELKGNDDTALRIRRAISVLKSLPFEVRSLKDTEGLPWISDEVKGIMEEIIEVGESREVQAVLNDEWYQSFHAFTRVFGVGVKTADKWYRMGLRTLEDVRSSKTLKLTPWQKVGLLYYEDLARGVTRAEADAIWLLVQDAVATFDPDAIVEIVGGFRRGKPQGHDVDLLISSPGAEKEQEDQLLGKVMNVWKKQGLLLCGRLEWSQWEWGGSPSGKADEGDAEASCFLILKLYDHLVRKSKRNMPTGSNMGESKPWKAIKVDLLRCPRGSFAFAMLQWTGSRMFRRDLRDYAREEKNMMLDNHSLYDMTRGIQLPAKSEEEIFEHLGLEYLEPFERNA

SEQ ID NO: 4635 - DNA, 1584 bp, synthetic construct
  misc_feature 1..1584: note = Variant of terminal deoxynucleotidyltransferase
  source 1..1584: mol_type = other DNA
atgcaccatcatcatcatggcggtagcggcagccacggcattcgtaccatcgattcggacttcgggaagaaacagcagaaaaaaggcgataaccacgatagttccgccacttatgaaatcaaatttcacgagtttgtgctgttcattctcgaagaaaaaatgggtgcgacgcgtcgtacttttctgacagatttagcccgcaagaaagggttccgcgtcgagaatgaactgaccgacgaagttacccacatcgtggcagaaaatctgtcacgctctgaagtattggcttggctgaaagaacacaagatggagaagaccaagcaattcgaactgctggatattagctggcttatcgaaagcatgaaagttggtaaaccggtggacaccaaggggaaataccagttggcggaatcggttgaggtgagtgcgaacccagatccgacagaaggtcgtgtaaacgagctgcctcctactatgaaaaccgtttctccgtatgcgtgtcaacgccgcaccaccctgaacaaccgtaatcaacgttttacggactcgctggagattcttcgtgaaatgtacgagctgaaaggcaacgacgatactgcgctgcgcatccgtcgtgctatctccgtgctgaaaagccttccgtttgaggtacgtagcctgaaagacacggaaggattgccctggatcagtgatgaagtcaaagggattatggaagaaatcatcgaagtcggggagtcgcgtgaagtgcaggccgtgctcaatgatgagtggtatcaaagcttccacgcatttacgcgtgtctttggagtgggggtgaagacagcagacaagtggtaccgtatgggtctgcgcaccctcgaggatgttcgttccagcaagaccctgaagttgaccccgtggcagaaagtaggtctgctgtattatgaagatcttgctcgcggcgttacgcgtgcggaagctgacgcgatttggctgctggttcaggatgcagtcgcaactttcgacccggatgcgatcgtggagattgtcggtggatttcgtcgtgggaaacctcagggtcacgacgttgatctgcttatcagttctccgggagctgaaaaagagcaagaagaccaactcctgcaacatgtgatgaatctgtggaagaaacaagggttgttgctgtgtggtcgtctggaatggagtcagtgggaatgggggggttcgccttccggtaaggctgatgagggtgacgcggaggcgtcgtgctttctgatcctcaaactttatgatcatctggtgcgcaaaagtaaacgcaatatgccgactggttcgaacatgggcgagtccaaaccgtggaaagcaattaaagtagatctgctgcgttgcccccgcggcagttttgcgtttgcgatgttgcagtggaccggaagccgcatgttccgtcgtgatctgcgcgactacgcccgcgaagagaagaacatgatgctggacaatcattcgctgtatgacatgactcgtggtatccaactccctgctaaatcggaagaggaaattttcgaacatctggggcttgaatacctggaaccgttcgaacgtaacgca

SEQ ID NO: 4636 - protein, 528 aa, synthetic construct
  REGION 1..528: note = Variant of terminal deoxynucleotidyltransferase
MHHHHHGGSGSHGIRTIDSDFGKKQQKKGDNHDSSATYEIKFHEFVLFILEEKMGATRRTFLTDLARKKGFRVENELTDEVTHIVAENLSRSEVLAWLKEHKMEKTKQFELLDISWLIESMKVGKPVDTKGKYQLAESVEVSANPDPTEGRVNELPPTMKTVSPYACQRRTTLNNRNQRFTDSLEILREMYELKGNDDTALRIRRAISVLKSLPFEVRSLKDTEGLPWISDEVKGIMEEIIEVGESREVQAVLNDEWYQSFHAFTRVFGVGVKTADKWYRMGLRTLEDVRSSKTLKLTPWQKVGLLYYEDLARGVTRAEADAIWLLVQDAVATFDPDAIVEIVGGFRRGKPQGHDVDLLISSPGAEKEQEDQLLQHVMNLWKKQGLLLCGRLEWSQWEWGGSPSGKADEGDAEASCFLILKLYDHLVRKSKRNMPTGSNMGESKPWKAIKVDLLRCPRGSFAFAMLQWTGSRMFRRDLRDYAREEKNMMLDNHSLYDMTRGIQLPAKSEEEIFEHLGLEYLEPFERNA

SEQ ID NO: 4637 - DNA, 1584 bp, synthetic construct
  misc_feature 1..1584: note = Variant of terminal deoxynucleotidyltransferase
  source 1..1584: mol_type = other DNA
atgcaccatcatcatcatggcggtagcggcagccacggcattcgtaccatcgattcggacttcgggaagaaacagcagaaaaaaggcgataaccacgatagttccgccacttatgaaatcaaatttcacgagtttgtgctgttcattctcgaagaaaaaatgggtgcgacgcgtcgtacttttctgacagatttagcccgcaagaaagggttccgcgtcgagaatgaactgaccgacgaagttacccacatcgtggcagaaaatctgtcacgctctgaagtattggcttggctgaaagaacacaagatggagaagaccaagcaattcgaactgctggatattagctggcttatcgaaagcatgaaagttggtaaaccggtggacaccaaggggaaataccagttggcggaatcggttgaggtgagtgcgaacccagatccgacagaaggtcgtgtaaacgagctgcctcctactatgaaaaccgtttctccgtatgcgtgtcaacgccgcaccaccctgaacaaccgtaatcaacgttttacggactcgctggagattcttcgtgaaatgtacgagctgaaaggcaacgacgatactgcgctgcgcatccgtcgtgctatctccgtgctgaaaagccttccgtttgaggtacgtagcctgaaagacacggaaggattgccctggatcagtgatgaagtcaaagggattatggaagaaatcatcgaagtcggggagtcgcgtgaagtgcaggccgtgctcaatgatgagtggtatcaaagcttccacgcatttacgcgtgtctttggagtgggggtgaagacagcagacaagtggtaccgtatgggtctgcgcaccctcgaggatgttcgttccagcaagaccctgaagttgaccccgtggcagaaagtaggtctgctgtattatgaagatcttgctcgcggcgttacgcgtgcggaagctgacgcgatttggctgctggttcaggatgcagtcgcaactttcgacccggatgcgatcgtggagattgtcggtggatttcgtcgtgggaaacctcagggtcacgacgttgatctgcttatcagttctccgggagctgaaaaagagcaagaagaccaactcctgggcaaggtgatgactctgtggaagaaacaagggttgttgctgtgtggtcgtctggaatggagtcagtgggaatgggggggttcgccttccggtaaggctgatgagggtgacgcggaggcgtcgtgctttctgatcctcaaactttatgatcatctggtgcgcaaaagtaaacgcaatatgccgactggttcgaacatgggcgagtccaaaccgtggaaagcaattaaagtagatctgctgcgttgcccccgcggcagttttgcgtttgcgatgttgcagtggaccggaagccgcatgttccgtcgtgatctgcgcgactacgcccgcgaagagaagaacatgatgctggacaatcattcgctgtatgacatgactcgtggtatccaactccctgctaaatcggaagaggaaattttcgaacatctggggcttgaatacctggaaccgttcgaacgtaacgca

SEQ ID NO: 4638 - protein, 528 aa, synthetic construct
  REGION 1..528: note = Variant of terminal deoxynucleotidyltransferase
MHHHHHGGSGSHGIRTIDSDFGKKQQKKGDNHDSSATYEIKFHEFVLFILEEKMGATRRTFLTDLARKKGFRVENELTDEVTHIVAENLSRSEVLAWLKEHKMEKTKQFELLDISWLIESMKVGKPVDTKGKYQLAESVEVSANPDPTEGRVNELPPTMKTVSPYACQRRTTLNNRNQRFTDSLEILREMYELKGNDDTALRIRRAISVLKSLPFEVRSLKDTEGLPWISDEVKGIMEEIIEVGESREVQAVLNDEWYQSFHAFTRVFGVGVKTADKWYRMGLRTLEDVRSSKTLKLTPWQKVGLLYYEDLARGVTRAEADAIWLLVQDAVATFDPDAIVEIVGGFRRGKPQGHDVDLLISSPGAEKEQEDQLLGKVMTLWKKQGLLLCGRLEWSQWEWGGSPSGKADEGDAEASCFLILKLYDHLVRKSKRNMPTGSNMGESKPWKAIKVDLLRCPRGSFAFAMLQWTGSRMFRRDLRDYAREEKNMMLDNHSLYDMTRGIQLPAKSEEEIFEHLGLEYLEPFERNA

SEQ ID NO: 4639 - DNA, 1584 bp, synthetic construct
  misc_feature 1..1584: note = Variant of terminal deoxynucleotidyltransferase
  source 1..1584: mol_type = other DNA
atgcaccatcatcatcatggcggtagcggcagccacggcattcgtaccatcgattcggacttcgggaagaaacagcagaaaaaaggcgataaccacgatagttccgccacttatgaaatcaaatttcacgagtttgtgctgttcattctcgaagaaaaaatgggtgcgacgcgtcgtacttttctgacagatttagcccgcaagaaagggttccgcgtcgagaatgaactgaccgacgaagttacccacatcgtggcagaaaatctgtcacgctctgaagtattggcttggctgaaagaacacaagatggagaagaccaagcaattcgaactgctggatattagctggcttatcgaaagcatgaaagttggtaaaccggtggacaccaaggggaaataccagttggcggaatcggttgaggtgagtgcgaacccagatccgacagaaggtcgtgtaaacgagctgcctcctactatgaaaaccgtttctccgtatgcgtgtcaacgccgcaccaccctgaacaaccgtaatcaacgttttacggactcgctggagattcttcgtgaaatgtacgagctgaaaggcaacgacgatactgcgctgcgcatccgtcgtgctatctccgtgctgaaaagccttccgtttgaggtacgtagcctgaaagacacggaaggattgccctggatcagtgatgaagtcaaagggattatggaagaaatcatcgaagtcggggagtcgcgtgaagtgcaggccgtgctcaatgatgagtggtatcaaagcttccacgcatttacgcgtgtctttggagtgggggtgaagacagcagacaagtggtaccgtatgggtctgcgcaccctcgaggatgttcgttccagcaagaccctgaagttgaccccgtggcagaaagtaggtctgctgtattatgaagatcttgctcgcggcgttacgcgtgccgaagctgacgcgatttggctgctggttcaggatgcagtcgcaactttcgacccggatgcgatcgtagagattgtcggtggatttcgtcgtgggaaacctcagggtcacgacgttgatctgcttatcagttctccgggagctgagcgcgagcaagaagaccaactcctgcagaaagtgatgaatctgtggaagaaacaagggttgttgctgtgcggtcgtctggaatggagtcagtgggaatgggggggttcgccttccggtaaggctgatgagggtgacgcggaggcgtcgtgctttctgatcctcaaactttatgatcatctggtgcgcaaaagtaaacgcaatatgccgactggttcgaacatgggcgagtccaaaccgtggaaagcaattaaagtagatctgctgcgttgcccccgcggcagttttgcgtttgcgatgttgcagtggaccggaagccgcatgttccgtcgtgatctgcgcgattacgccctggaagagaagaacatgatgctggacaatcattcgctgtatgacatgactcgtggtatccaactccctgctaaatcggaagaggaaattttcgaacatctggggcttgaatacctggaaccgttcgaacgtaacgca

SEQ ID NO: 4640 - protein, 528 aa, synthetic construct
  REGION 1..528: note = Variant of terminal deoxynucleotidyltransferase
MHHHHHGGSGSHGIRTIDSDFGKKQQKKGDNHDSSATYEIKFHEFVLFILEEKMGATRRTFLTDLARKKGFRVENELTDEVTHIVAENLSRSEVLAWLKEHKMEKTKQFELLDISWLIESMKVGKPVDTKGKYQLAESVEVSANPDPTEGRVNELPPTMKTVSPYACQRRTTLNNRNQRFTDSLEILREMYELKGNDDTALRIRRAISVLKSLPFEVRSLKDTEGLPWISDEVKGIMEEIIEVGESREVQAVLNDEWYQSFHAFTRVFGVGVKTADKWYRMGLRTLEDVRSSKTLKLTPWQKVGLLYYEDLARGVTRAEADAIWLLVQDAVATFDPDAIVEIVGGFRRGKPQGHDVDLLISSPGAEREQEDQLLQKVMNLWKKQGLLLCGRLEWSQWEWGGSPSGKADEGDAEASCFLILKLYDHLVRKSKRNMPTGSNMGESKPWKAIKVDLLRCPRGSFAFAMLQWTGSRMFRRDLRDYALEEKNMMLDNHSLYDMTRGIQLPAKSEEEIFEHLGLEYLEPFERNA

SEQ ID NO: 4641 - DNA, 1584 bp, synthetic construct
  misc_feature 1..1584: note = Variant of terminal deoxynucleotidyltransferase
  source 1..1584: mol_type = other DNA
atgcaccatcatcatcatggcggtagcggcagccacggcattcgtaccatcgattcggacttcgggaagaaacagcagaaaaaaggcgataaccacgatagttccgccacttatgaaatcaaatttcacgagtttgtgctgttcattctcgaagaaaaaatgggtgcgacgcgtcgtacttttctgacagatttagcccgcaagaaagggttccgcgtcgagaatgaactgaccgacgaagttacccacatcgtggcagaaaatctgtcacgctctgaagtattggcttggctgaaagaacacaagatggagaagaccaagcaattcgaactgctggatattagctggcttatcgaaagcatgaaagttggtaaaccggtggacaccaaggggaaataccagttggcggaatcggttgaggtgagtgcgaacccagatccgacagaaggtcgtgtaaacgagctgcctcctactatgaaaaccgtttctccgtatgcgtgtcaacgccgcaccaccctgaacaaccgtaatcaacgttttacggactcgctggagattcttcgtgaaatgtacgagctgaaaggcaacgacgatactgcgctgcgcatccgtcgtgctatctccgtgctgaaaagccttccgtttgaggtacgtagcctgaaagacacggaaggattgccctggatcagtgatgaagtcaaagggattatggaagaaatcatcgaagtcggggagtcgcgtgaagtgcaggccgtgctcaatgatgagtggtatcaaagcttccacgcatttacgcgtgtctttggagtgggggtgaagacagcagacaagtggtaccgtatgggtctgcgcaccctcgaggatgttcgttccagcaagaccctgaagttgaccccgtggcagaaagtaggtctgctgtattatgaagatcttgctcgcggcgttacgcgtgcggaagctgacgcgatttggctgctggttcaggatgcagtcgcaactttcgacccggatgcgatcgtggagattgtcggtggatttcgtcgtgggaaacctcagggtcacgacgttgatctgcttatcagttctccgggagctgaaaaagagcaagaagaccaactcctgggcaaggtgatgaatgtgtggaagaaacaagggttgttgctgtgtggtcgtctggaatggagtcagtgggaatgggggggttcgccttccggtaaggctgatgagggtgacgcggaggcgtcgtgctttctgatcctcaaactttatgatcatctggtgcgcaaaagtaaacgcaatatgccgactggttcgaacatgggcgagtccaaaccgtggaaagcaattaaagtagatctgctgcgttgcccccgcggcagttttgcgtttgcgatgttgcagtggaccggaagccgcatgttccgtcgtgatctgcgcgattacgccctggaagagaagaacatgatgctggacaatcattcgctgtatgacatgactcgtggtatccaactccctgctaaatcggaagaggaaattttcgaacatctggggcttgaatacctggaaccgttcgaacgtaacgca

SEQ ID NO: 4642 - protein, 528 aa, synthetic construct
  REGION 1..528: note = Variant of terminal deoxynucleotidyltransferase
MHHHHHGGSGSHGIRTIDSDFGKKQQKKGDNHDSSATYEIKFHEFVLFILEEKMGATRRTFLTDLARKKGFRVENELTDEVTHIVAENLSRSEVLAWLKEHKMEKTKQFELLDISWLIESMKVGKPVDTKGKYQLAESVEVSANPDPTEGRVNELPPTMKTVSPYACQRRTTLNNRNQRFTDSLEILREMYELKGNDDTALRIRRAISVLKSLPFEVRSLKDTEGLPWISDEVKGIMEEIIEVGESREVQAVLNDEWYQSFHAFTRVFGVGVKTADKWYRMGLRTLEDVRSSKTLKLTPWQKVGLLYYEDLARGVTRAEADAIWLLVQDAVATFDPDAIVEIVGGFRRGKPQGHDVDLLISSPGAEKEQEDQLLGKVMNVWKKQGLLLCGRLEWSQWEWGGSPSGKADEGDAEASCFLILKLYDHLVRKSKRNMPTGSNMGESKPWKAIKVDLLRCPRGSFAFAMLQWTGSRMFRRDLRDYALEEKNMMLDNHSLYDMTRGIQLPAKSEEEIFEHLGLEYLEPFERNA

SEQ ID NO: 4643 - DNA, 1584 bp, synthetic construct
  misc_feature 1..1584: note = Variant of terminal deoxynucleotidyltransferase
  source 1..1584: mol_type = other DNA
atgcaccatcatcatcatggcggtagcggcagccacggcattcgtaccatcgattcggacttcgggaagaaacagcagaaaaaaggcgataaccacgatagttccgccacttatgaaatcaaatttcacgagtttgtgctgttcattctcgaagaaaaaatgggtgcgacgcgtcgtacttttctgacagatttagcccgcaagaaagggttccgcgtcgagaatgaactgaccgacgaagttacccacatcgtggcagaaaatctgtcacgctctgaagtattggcttggctgaaagaacacaagatggagaagaccaagcaattcgaactgctggatattagctggcttatcgaaagcatgaaagttggtaaaccggtggacaccaaggggaaataccagttggcggaatcggttgaggtgagtgcgaacccagatccgacagaaggtcgtgtaaacgagctgcctcctactatgaaaaccgtttctccgtatgcgtgtcaacgccgcaccaccctgaacaaccgtaatcaacgttttacggactcgctggagattcttcgtgaaatgtacgagctgaaaggcaacgacgatactgcgctgcgcatccgtcgtgctatctccgtgctgaaaagccttccgtttgaggtacgtagcctgaaagacacggaaggattgccctggatcagtgatgaagtcaaagggattatggaagaaatcatcgaagtcggggagtcgcgtgaagtgcaggccgtgctcaatgatgagtggtatcaaagcttccacgcatttacgcgtgtctttggagtgggggtgaagacagcagacaagtggtaccgtatgggtctgcgcaccctcgaggatgttcgttccagcaagaccctgaagttgaccccgtggcagaaagtaggtctgctgtattatgaagatcttgctcgcggcgttacgcgtgcggaagctgacgcgatttggctgctggttcaggatgcagtcgcaactttcgacccggatgcgatcgtggagattgtcggtggatttcgtcgtgggaaacctcagggtcacgacgttgatctgcttatcagttctccgggagctgaaaaagagcaagaagaccaactcctgcaaaaggtgatgactctgtggaagaaacaagggttgttgctgtgtggtcgtctggaatggagtcagtgggaatgggggggttcgccttccggtaaggctgatgagggtgacgcggaggcgtcgtgctttctgatcctcaaactttatgatcatctggtgcgcaaaagtaaacgcaatatgccgactggttcgaacatgggcgagtccaaaccgtggaaagcaattaaagtagatctgctgcgttgcccccgcggcagttttgcgtttgcgatgttgcagtggaccggaagccgcatgttccgtcgtgatctgcgcgactacgcccgcgaagagaagaacatgatgctggacaatcattcgctgtatgacatgactcgtggtatccaactccctgctaaatcggaagaggaaattttcgaacatctggggcttgaatacctggaaccgttcgaacgtaacgca

SEQ ID NO: 4644 - protein, 528 aa, synthetic construct
  REGION 1..528: note = Variant of terminal deoxynucleotidyltransferase
MHHHHHGGSGSHGIRTIDSDFGKKQQKKGDNHDSSATYEIKFHEFVLFILEEKMGATRRTFLTDLARKKGFRVENELTDEVTHIVAENLSRSEVLAWLKEHKMEKTKQFELLDISWLIESMKVGKPVDTKGKYQLAESVEVSANPDPTEGRVNELPPTMKTVSPYACQRRTTLNNRNQRFTDSLEILREMYELKGNDDTALRIRRAISVLKSLPFEVRSLKDTEGLPWISDEVKGIMEEIIEVGESREVQAVLNDEWYQSFHAFTRVFGVGVKTADKWYRMGLRTLEDVRSSKTLKLTPWQKVGLLYYEDLARGVTRAEADAIWLLVQDAVATFDPDAIVEIVGGFRRGKPQGHDVDLLISSPGAEKEQEDQLLQKVMTLWKKQGLLLCGRLEWSQWEWGGSPSGKADEGDAEASCFLILKLYDHLVRKSKRNMPTGSNMGESKPWKAIKVDLLRCPRGSFAFAMLQWTGSRMFRRDLRDYAREEKNMMLDNHSLYDMTRGIQLPAKSEEEIFEHLGLEYLEPFERNA

SEQ ID NO: 4645 - DNA, 1584 bp, synthetic construct
  misc_feature 1..1584: note = Variant of terminal deoxynucleotidyltransferase
  source 1..1584: mol_type = other DNA
atgcaccatcatcatcatggcggtagcggcagccacggcattcgtaccatcgattcggacttcgggaagaaacagcagaaaaaaggcgataaccacgatagttccgccacttatgaaatcaaatttcacgagtttgtgctgttcattctcgaagaaaaaatgggtgcgacgcgtcgtacttttctgacagatttagcccgcaagaaagggttccgcgtcgagaatgaactgaccgacgaagttacccacatcgtggcagaaaatctgtcacgctctgaagtattggcttggctgaaagaacacaagatggagaagaccaagcaattcgaactgctggatattagctggcttatcgaaagcatgaaagttggtaaaccggtggacaccaaggggaaataccagttggcggaatcggttgaggtgagtgcgaacccagatccgacagaaggtcgtgtaaacgagctgcctcctactatgaaaaccgtttctccgtatgcgtgtcaacgccgcaccaccctgaacaaccgtaatcaacgttttacggactcgctggagattcttcgtgaaatgtacgagctgaaaggcaacgacgatactgcgctgcgcatccgtcgtgctatctccgtgctgaaaagccttccgtttgaggtacgtagcctgaaagacacggaaggattgccctggatcagtgatgaagtcaaagggattatggaagaaatcatcgaagtcggggagtcgcgtgaagtgcaggccgtgctcaatgatgagtggtatcaaagcttccacgcatttacgcgtgtctttggagtgggggtgaagacagcagacaagtggtaccgtatgggtctgcgcaccctcgaggatgttcgttccagcaagaccctgaagttgaccccgtggcagaaagtaggtctgctgtattatgaagatcttgctcgcggcgttacgcgtgcggaagctgacgcgatttggctgctggttcaggatgcagtcgcaactttcgacccggatgcgatcgtggagattgtcggtggatttcgtcgtgggaaacctcagggtcacgacgttgatctgcttatcagttctccgggagctgaaaaagagcaagaagaccaactcctgggcaaggtgatgaatgtgtggaagaaacaagggttgttgctgtgtggtcgtctggaatggagtcagtgggaatggccaggttcgccttccggtaaggctgatgagggtgacgcggaggcgtcgtgctttctgatcctcaaactttatgatcatctggtgcgcaaaagtaaacgcaatatgccgactggttcgaacatgggcgagtccaaaccgtggaaagcaattaaagtagatctgctgcgttgcccccgcggcagttttgcgtttgcgatgttgcagtggaccggaagccgcatgttccgtcgtgatctgcgcgactacgcccgcgaagagaagaacatgatgctggacaatcattcgctgtatgacatgactcgtggtatccaactccctgctaaatcggaagaggaaattttcgaacatctggggcttgaatacctggaaccgttcgaacgtaacgca

SEQ ID NO: 4646 - protein, 528 aa, synthetic construct
  REGION 1..528: note = Variant of terminal deoxynucleotidyltransferase
MHHHHHGGSGSHGIRTIDSDFGKKQQKKGDNHDSSATYEIKFHEFVLFILEEKMGATRRTFLTDLARKKGFRVENELTDEVTHIVAENLSRSEVLAWLKEHKMEKTKQFELLDISWLIESMKVGKPVDTKGKYQLAESVEVSANPDPTEGRVNELPPTMKTVSPYACQRRTTLNNRNQRFTDSLEILREMYELKGNDDTALRIRRAISVLKSLPFEVRSLKDTEGLPWISDEVKGIMEEIIEVGESREVQAVLNDEWYQSFHAFTRVFGVGVKTADKWYRMGLRTLEDVRSSKTLKLTPWQKVGLLYYEDLARGVTRAEADAIWLLVQDAVATFDPDAIVEIVGGFRRGKPQGHDVDLLISSPGAEKEQEDQLLGKVMNVWKKQGLLLCGRLEWSQWEWPGSPSGKADEGDAEASCFLILKLYDHLVRKSKRNMPTGSNMGESKPWKAIKVDLLRCPRGSFAFAMLQWTGSRMFRRDLRDYAREEKNMMLDNHSLYDMTRGIQLPAKSEEEIFEHLGLEYLEPFERNA

SEQ ID NO: 4647 - DNA, 1584 bp, synthetic construct
  misc_feature 1..1584: note = Variant of terminal deoxynucleotidyltransferase
  source 1..1584: mol_type = other DNA
atgcaccatcatcatcatggcggtagcggcagccacggcattcgtaccatcgattcggacttcgggaagaaacagcagaaaaaaggcgataaccacgatagttccgccacttatgaaatcaaatttcacgagtttgtgctgttcattctcgaagaaaaaatgggtgcgacgcgtcgtacttttctgacagatttagcccgcaagaaagggttccgcgtcgagaatgaactgaccgacgaagttacccacatcgtggcagaaaatctgtcacgctctgaagtattggcttggctgaaagaacacaagatggagaagaccaagcaattcgaactgctggatattagctggcttatcgaaagcatgaaagttggtaaaccggtggacaccaaggggaaataccagttggcggaatcggttgaggtgagtgcgaacccagatccgacagaaggtcgtgtaaacgagctgcctcctactatgaaaaccgtttctccgtatgcgtgtcaacgccgcaccaccctgaacaaccgtaatcaacgttttacggactcgctggagattcttcgtgaaatgtacgagctgaaaggcaacgacgatactgcgctgcgcatccgtcgtgctatctccgtgctgaaaagccttccgtttgaggtacgtagcctgaaagacacggaaggattgccctggatcagtgatgaagtcaaagggattatggaagaaatcatcgaagtcggggagtcgcgtgaagtgcaggccgtgctcaatgatgagtggtatcaaagcttccacgcatttacgcgtgtctttggagtgggggtgaagacagcagacaagtggtaccgtatgggtctgcgcaccctcgaggatgttcgttccagcaagaccctgaagttgaccccgtggcagaaagtaggtctgctgtattatgaagatcttgctcgcggcgttacgcgtgaggaagctgacgcgatttggctgctggttcaggatgcagtcgcaactttcgacccggatgcgatcgtggagattgtcggtggatttcgtcgtgggaaacctcagggtcacgacgttgatctgcttatcagttctccgggagctgaaaaagagcaagaagaccaactcctgggcaaggtgatgaatgtgtggaagaaacaagggttgttgctgtgtggtcgtctggaatggagtcagtgggaatgggggggttcgccttccggtaaggctgatgagggtgacgcggaggcgtcgtgctttctgatcctcaaactttatgatcatctggtgcgcaaaagtaaacgcaatatgccgactggttcgaacatgggcgagtccaaaccgtggaaagcaattaaagtagatctgctgcgttgcccccgcggcagttttgcgtttgcgatgttgcagtggaccggaagccgcatgttccgtcgtgatctgcgcgactacgccctggaagagaagaacatgatgctggacaatcattcgctgtatgacatgactcgtggtatccaactccctgctaaatcggaagaggaaattttcgaacatctggggcttgaatacctggaaccgttcgaacgtaacgca

SEQ ID NO: 4648 - protein, 528 aa, synthetic construct
  REGION 1..528: note = Variant of terminal deoxynucleotidyltransferase
MHHHHHGGSGSHGIRTIDSDFGKKQQKKGDNHDSSATYEIKFHEFVLFILEEKMGATRRTFLTDLARKKGFRVENELTDEVTHIVAENLSRSEVLAWLKEHKMEKTKQFELLDISWLIESMKVGKPVDTKGKYQLAESVEVSANPDPTEGRVNELPPTMKTVSPYACQRRTTLNNRNQRFTDSLEILREMYELKGNDDTALRIRRAISVLKSLPFEVRSLKDTEGLPWISDEVKGIMEEIIEVGESREVQAVLNDEWYQSFHAFTRVFGVGVKTADKWYRMGLRTLEDVRSSKTLKLTPWQKVGLLYYEDLARGVTREEADAIWLLVQDAVATFDPDAIVEIVGGFRRGKPQGHDVDLLISSPGAEKEQEDQLLGKVMNVWKKQGLLLCGRLEWSQWEWGGSPSGKADEGDAEASCFLILKLYDHLVRKSKRNMPTGSNMGESKPWKAIKVDLLRCPRGSFAFAMLQWTGSRMFRRDLRDYALEEKNMMLDNHSLYDMTRGIQLPAKSEEEIFEHLGLEYLEPFERNA

SEQ ID NO: 4649 - DNA, 1584 bp, synthetic construct
  misc_feature 1..1584: note = Variant of terminal deoxynucleotidyltransferase
  source 1..1584: mol_type = other DNA
atgcaccatcatcatcatggcggtagcggcagccacggcattcgtaccatcgattcggacttcgggaagaaacagcagaaaaaaggcgataaccacgatagttccgccacttatgaaatcaaatttcacgagtttgtgctgttcattctcgaagaaaaaatgggtgcgacgcgtcgtacttttctgacagatttagcccgcaagaaagggttccgcgtcgagaatgaactgaccgacgaagttacccacatcgtggcagaaaatctgtcacgctctgaagtattggcttggctgaaagaacacaagatggagaagaccaagcaattcgaactgctggatattagctggcttatcgaaagcatgaaagttggtaaaccggtggacaccaaggggaaataccagttggcggaatcggttgaggtgagtgcgaacccagatccgacagaaggtcgtgtaaacgagctgcctcctactatgaaaaccgtttctccgtatgcgtgtcaacgccgcaccaccctgaacaaccgtaatcaacgttttacggactcgctggagattcttcgtgaaaattacgagctgaaaggcaacgacgatactgcgctggaatttcgtcgtgctatctccgtgctgaaaagccttccgtttgaggtacgtagcctgaaagacacggaaggattgccctggatcagtgatgaagtcaaagggattatggaagaaatcatcgaagtcggggagtcgcgtgaagtgcaggccgtgctcaatgatgagtggtatcaaagcttccacgcatttacgcgtgtctttggagtgggggtgaagacagcagacaagtggtaccgtatgggtctgcgcaccctcgaggatgttcgttccagcaagaccctgcctttgaccacgtggcaaaaagtaggtctgctgtattatgaagatcttgctcgcggcgttacgcgtgccgaagctgacgcgatttggctgctggttcaggatgcagtcgcaactttcgacccggatgcgatcgtggagattgtcggtggacagcgtcgtgggaaacctcagggtcacgacgttgatctgcttatcagttctccgggagctgaaaaagagcaagaagaccaactcctgcagaaagtgatgaatctgtggaagaaacaagggttgttgctgtgtggtcgtctggaatggagtcagtgggaatgggggggttcgccttccggtaaggctgatgagggtgacgcggaggcgtcgtgctttctgatcctcaaactttatgatcatctggtgcgtaaaagtaaacgcaatatgccgactggttcgaacatgggcgagtccaaaccgtggaaagcaattaaagtagatctgctgcgttgcccccgcggcagttttgcgtttgcgatgttgcagtggaccggaagtcgcatgttccgtcgtgatctgcgctggtacgccctggaagagaagaacatgatgctggacaatcattcgctgtatgacatgactcgtggtatccaactccctgctaaatcggaagaggaaattttcgaacatctggggcttgaatacctggaaccgttcgaacgtaacgca

SEQ ID NO: 4650 - protein, 528 aa, synthetic construct
  REGION 1..528: note = Variant of terminal deoxynucleotidyltransferase
MHHHHHGGSGSHGIRTIDSDFGKKQQKKGDNHDSSATYEIKFHEFVLFILEEKMGATRRTFLTDLARKKGFRVENELTDEVTHIVAENLSRSEVLAWLKEHKMEKTKQFELLDISWLIESMKVGKPVDTKGKYQLAESVEVSANPDPTEGRVNELPPTMKTVSPYACQRRTTLNNRNQRFTDSLEILRENYELKGNDDTALEFRRAISVLKSLPFEVRSLKDTEGLPWISDEVKGIMEEIIEVGESREVQAVLNDEWYQSFHAFTRVFGVGVKTADKWYRMGLRTLEDVRSSKTLPLTTWQKVGLLYYEDLARGVTRAEADAIWLLVQDAVATFDPDAIVEIVGGQRRGKPQGHDVDLLISSPGAEKEQEDQLLQKVMNLWKKQGLLLCGRLEWSQWEWGGSPSGKADEGDAEASCFLILKLYDHLVRKSKRNMPTGSNMGESKPWKAIKVDLLRCPRGSFAFAMLQWTGSRMFRRDLRWYALEEKNMMLDNHSLYDMTRGIQLPAKSEEEIFEHLGLEYLEPFERNA

SEQ ID NO: 4651 - DNA, 1584 bp, synthetic construct
  misc_feature 1..1584: note = Variant of terminal deoxynucleotidyltransferase
  source 1..1584: mol_type = other DNA
atgcaccatcatcatcatggcggtagcggcagccacggcattcgtaccatcgattcggacttcgggaagaaacagcagaaaaaaggcgataaccacgatagttccgccacttatgaaatcaaatttcacgagtttgtgctgttcattctcgaagaaaaaatgggtgcgacgcgtcgtacttttctgacagatttagcccgcaagaaagggttccgcgtcgagaatgaactgaccgacgaagttacccacatcgtggcagaaaatctgtcacgctctgaagtattggcttggctgaaagaacacaagatggagaagaccaagcaattcgaactgctggatattagctggcttatcgaaagcatgaaagttggtaaaccggtggacaccaaggggaaataccagttggcggaatcggttgaggtgagtgcgaacccagatccgacagaaggtcgtgtaaacgagctgcctcctactatgaaaaccgtttctccgtatgcgtgtcaacgccgcaccaccctgaacaaccgtaatcaacgttttacggactcgctggagattcttcgtgaaaattacaccctgaaaggcaacgacgatactgcgctggaatttcgtcgtgctatctccgtgcttaaaagccttccgtttgaggtacgtagcctgaaagacacggaaggattgccctggatcagtgatgaagtcaaagggattatggaagaaatcatcgaagtcggggagtcgcgtgaagtgcaggccgtgctcaatgatgagtggtatcaaagcttccacgcatttacgcgtgtctttggagtgggggtgaagacagcagacaagtggtaccgtatgggtctgcgcaccctcgaggatgttcgttccagcaagaccctgaagttgaccccgtggcagaaagtaggtctgctgtattatgaagatcttgctcgcggcgttacgcgtgccgaagctgacgcgatttggctgctggttcaggatgcagtcgcaactttcgacccggatgcgatcgtggagattgtcggtggacagcgtcgtgggaaacctcagggtcacgacgttgatctgcttatcagttctccgggagctgaaaaagagcaagaagaccaactcctgcagaaagtgatgaatctgtggaagaaacaagggttgttgctgtgtggtcgtctggaatggagtcagtgggaatgggggggtctgccgtccggtaaggctgatgagggtgacgcggaggcgtcgtgctttctgatcctcaaactttatgatcatctggtgcgtaaaagtaaacgcaatatgccgactggttcgaacatgggcgagtccaaaccgtggaaagcaattaaagtagatctgctgcgttgcccccgcggcagttttgcgtttgcgatgttgcagtggaccggaagccgcatgttccgtcgtgatctgcgctggtacgccctggaagagaagaacatgatgctggacaatcattcgctgtatgacatgactcgtggtatccaactccctgctcgcagtgaagaggaaattttcgaacatctggggcttgaatacctggaaccgttcgaacgtaacgca

SEQ ID NO: 4652 - protein, 528 aa, synthetic construct
  REGION 1..528: note = Variant of terminal deoxynucleotidyltransferase
MHHHHHGGSGSHGIRTIDSDFGKKQQKKGDNHDSSATYEIKFHEFVLFILEEKMGATRRTFLTDLARKKGFRVENELTDEVTHIVAENLSRSEVLAWLKEHKMEKTKQFELLDISWLIESMKVGKPVDTKGKYQLAESVEVSANPDPTEGRVNELPPTMKTVSPYACQRRTTLNNRNQRFTDSLEILRENYTLKGNDDTALEFRRAISVLKSLPFEVRSLKDTEGLPWISDEVKGIMEEIIEVGESREVQAVLNDEWYQSFHAFTRVFGVGVKTADKWYRMGLRTLEDVRSSKTLKLTPWQKVGLLYYEDLARGVTRAEADAIWLLVQDAVATFDPDAIVEIVGGQRRGKPQGHDVDLLISSPGAEKEQEDQLLQKVMNLWKKQGLLLCGRLEWSQWEWGGLPSGKADEGDAEASCFLILKLYDHLVRKSKRNMPTGSNMGESKPWKAIKVDLLRCPRGSFAFAMLQWTGSRMFRRDLRWYALEEKNMMLDNHSLYDMTRGIQLPARSEEEIFEHLGLEYLEPFERNA

SEQ ID NO: 4653 - DNA, 1584 bp, synthetic construct
  misc_feature 1..1584: note = Variant of terminal deoxynucleotidyltransferase
  source 1..1584: mol_type = other DNA
atgcaccatcatcatcatggcggtagcggcagccacggcattcgtaccatcgattcggacttcgggaagaaacagcagaaaaaaggcgataaccacgatagttccgccacttatgaaatcaaatttcacgagtttgtgctgttcattctcgaagaaaaaatgggtgcgacgcgtcgtacttttctgacagatttagcccgcaagaaagggttccgcgtcgagaatgaactgaccgacgaagttacccacatcgtggcagaaaatctgtcacgctctgaagtattggcttggctgaaagaacacaagatggagaagaccaagcaattcgaactgctggatattagctggcttatcgaaagcatgaaagttggtaaaccggtggacaccaaggggaaataccagttggcggaatcggttgaggtgagtgcgaacccagatccgacagaaggtcgtgtaaacgagctgcctcctactatgaaaaccgtttctccgtatgcgtgtcaacgccgcaccaccctgaacaaccgtaatcaacgttttacggactcgctggagattcttcgtgaaaattacgagctgaaaggcaacgacgatactgcgctggaatttcgtcgtgctatctccgtgctgaaaagccttccgtttgaggtacgtagcctgaaagacacggaaggattgccctggatcagtgatgaagtcaaagggattatggaagaaatcatcgaagtcggggagtcgcgtgaagtgcaggccgtgctcaatgatgagtggtatcaaagcttccacgcatttacgcgtgtctttggagtgggggtgaagacagcagacaagtggtaccgcatgggtctgcgcaccctcgaggatgttcgttccagcaagaccctgaagttgaccccgtggcagaaagtaggtctgctgtattatgaagatcttgctcgcggcgttacgcgtgccgaagctgacgcgatttggctgctggttcaggatgcagtcgcaactttcgacccggatgcgatcgtggagattgtcggtggacagcgtcgtgggaaacctcagggtcacgacgttgatctgcttatcagttctccgggagctgaaaaagagcaagaagaccaactcctgcagaaagtgatgaatctgtggaagaaacaagggttgttgctgtgtggtcgtctggaatggagtcagtgggaatgggggggtctgccgtccggtaaggctgatgagggtgacgcggaggcgtcgtgctttctgatcctcaaactttatgatcatctggtgcgtaaaagtaaacgcaatatgccgactggttcgaacatgggcgagtccaaaccgtggaaagcaattaaagtagatctgctgcgttgcccccgcggcagttttgcgtttgcgatgttgcagtggaccggaagccgcatgttccgtcgtgatctgcgctggtacgccctggaagagaagaacatgatgctggacaatcattcgctgtatgacatgactcgtggtatccaactccctgctaaatcggaagaggaaattttcgaacatctggggcttgaatacctggaaccgttcgaacgtaacgca

SEQ ID NO: 4654 - protein, 528 aa, synthetic construct
  REGION 1..528: note = Variant of terminal deoxynucleotidyltransferase
MHHHHHGGSGSHGIRTIDSDFGKKQQKKGDNHDSSATYEIKFHEFVLFILEEKMGATRRTFLTDLARKKGFRVENELTDEVTHIVAENLSRSEVLAWLKEHKMEKTKQFELLDISWLIESMKVGKPVDTKGKYQLAESVEVSANPDPTEGRVNELPPTMKTVSPYACQRRTTLNNRNQRFTDSLEILRENYELKGNDDTALEFRRAISVLKSLPFEVRSLKDTEGLPWISDEVKGIMEEIIEVGESREVQAVLNDEWYQSFHAFTRVFGVGVKTADKWYRMGLRTLEDVRSSKTLKLTPWQKVGLLYYEDLARGVTRAEADAIWLLVQDAVATFDPDAIVEIVGGQRRGKPQGHDVDLLISSPGAEKEQEDQLLQKVMNLWKKQGLLLCGRLEWSQWEWGGLPSGKADEGDAEASCFLILKLYDHLVRKSKRNMPTGSNMGESKPWKAIKVDLLRCPRGSFAFAMLQWTGSRMFRRDLRWYALEEKNMMLDNHSLYDMTRGIQLPAKSEEEIFEHLGLEYLEPFERNA

SEQ ID NO: 4655 - DNA, 1584 bp, synthetic construct
  misc_feature 1..1584: note = Variant of terminal deoxynucleotidyltransferase
  source 1..1584: mol_type = other DNA
atgcaccatcatcatcatggcggtagcggcagccacggcattcgtaccatcgattcggacttcgggaagaaacagcagaaaaaaggcgataaccacgatagttccgccacttatgaaatcaaatttcacgagtttgtgctgttcattctcgaagaaaaaatgggtgcgacgcgtcgtacttttctgacagatttagcccgcaagaaagggttccgcgtcgagaatgaactgaccgacgaagttacccacatcgtggcagaaaatctgtcacgctctgaagtattggcttggctgaaagaacacaagatggagaagaccaagcaattcgaactgctggatattagctggcttatcgaaagcatgaaagttggtaaaccggtggacaccaaggggaaataccagttggcggaatcggttgaggtgagtgcgaacccagatccgacagaaggtcgtgtaaacgagctgcctcctactatgaaaaccgtttctccgtatgcgtgtcaacgccgcaccaccctgaacaaccgtaatcaacgttttacggactcgctggagattcttcgtgaaaattacaccctgaaaggcaacgacgatactgcgctggaatttcgtcgtgctatctccgtgctgaaaagccttccgtttgaggtacgtagcctgaaagacacggaaggattgccctggatcagtgatgaagtcaaagggattatggaagaaatcatcgaagtcggggagtcgcgtgaagtgcaggccgtgctcaatgatgagtggtatcaaagcttccacgcatttacgcgtgtctttggagtgggggtgaagacagcagacaagtggtaccacatgggtctgcgcaccctcgaggatgttcgttccagcaagaccctgaagttgaccccgtggcagaaagtaggtctgctgtattacgaagatcttgctcgcggcgttacgcgtgccgaagctgacgcgatttggctgctggttcaggatgcagtcgcaactttcgacccggatgcgatcgtggagattgtcggtggacagcgtcgtgggaaacctcagggtcacgacgttgatctgcttatcagttctccgggagctgaaaaagagcaagaagaccaactcctgcagaaagtgatgaatctgtggaagaaacaagggttgttgctgtgtggtcgtctggaatggagtcagtgggaatgggggggttcgccttccggtaaggctgatgagggtgacgcggaggcgtcgtgctttctgatcctcaaactttatgatcatctggtgcgtaaaagtaaacgcaatatgccgactggttcgaacatgggcgagtccaaaccgtggaaagcaattaaagtagatctgctgcgttgcccccgcggcagttttgcgtttgcgatgttgcagtggaccggaagccgcatgttccgtcgtgatctgcgctggtacgccctggaagagaagaacatgatgctggacaatcattcgctgtatgacatgactcgtggtatccaactccctgctaaatcggaagaggaaattttcgaacatctggggcttgaatacctggaaccgttcgaacgtaacgca

SEQ ID NO: 4656 - protein, 528 aa, synthetic construct
  REGION 1..528: note = Variant of terminal deoxynucleotidyltransferase
MHHHHHGGSGSHGIRTIDSDFGKKQQKKGDNHDSSATYEIKFHEFVLFILEEKMGATRRTFLTDLARKKGFRVENELTDEVTHIVAENLSRSEVLAWLKEHKMEKTKQFELLDISWLIESMKVGKPVDTKGKYQLAESVEVSANPDPTEGRVNELPPTMKTVSPYACQRRTTLNNRNQRFTDSLEILRENYTLKGNDDTALEFRRAISVLKSLPFEVRSLKDTEGLPWISDEVKGIMEEIIEVGESREVQAVLNDEWYQSFHAFTRVFGVGVKTADKWYHMGLRTLEDVRSSKTLKLTPWQKVGLLYYEDLARGVTRAEADAIWLLVQDAVATFDPDAIVEIVGGQRRGKPQGHDVDLLISSPGAEKEQEDQLLQKVMNLWKKQGLLLCGRLEWSQWEWGGSPSGKADEGDAEASCFLILKLYDHLVRKSKRNMPTGSNMGESKPWKAIKVDLLRCPRGSFAFAMLQWTGSRMFRRDLRWYALEEKNMMLDNHSLYDMTRGIQLPAKSEEEIFEHLGLEYLEPFERNA

SEQ ID NO: 4657 - DNA, 1584 bp, synthetic construct
  misc_feature 1..1584: note = Variant of terminal deoxynucleotidyltransferase
  source 1..1584: mol_type = other DNA
atgcaccatcatcatcatggcggtagcggcagccacggcattcgtaccatcgattcggacttcgggaagaaacagcagaaaaaaggcgataaccacgatagttccgccacttatgaaatcaaatttcacgagtttgtgctgttcattctcgaagaaaaaatgggtgcgacgcgtcgtacttttctgacagatttagcccgcaagaaagggttccgcgtcgagaatgaactgaccgacgaagttacccacatcgtggcagaaaatctgtcacgctctgaagtattggcttggctgaaagaacacaagatggagaagaccaagcaattcgaactgctggatattagctggcttatcgaaagcatgaaagttggtaaaccggtggacaccaaggggaaataccagttggcggaatcggttgaggtgagtgcgaacccagatccgacagaaggtcgtgtaaacgagctgcctcctactatgaaaaccgtttctccgtatgcgtgtcaacgccgcaccaccctgaacaaccgtaatcaacgttttacggactcgctgggtattcttcgtgaaatgtacgagctgaaaggcaacgacgatactgcgctggaatttcgtcgtgctatctccgtgctgaaaagccttccgtttgaggtacgtagcctgaaagacacggaaggattgccctggatcagtgatgaagtcaaagggattatggaagaaatcatcgaagtcggggagtcgcgtgaagtgcaggccgtgctcaatgatgagtggtatcaaagcttccacgcatttacgcgtgtctttggagtgggggtgaagacagcagacaagtggtaccgtatgggtctgcgcaccctcgaggatgttcgttccagcaagaccctgaagttgaccccgtggcagaaagtaggtctgctgtattatgaagatcttgctcgcggcgttacgcgtgccgaagctgacgcgatttggctgctggttcaggatgcagtcgcaactttcgacccggatgcgatcgtggagattgtcggtggacagcgtcgtgggaaacctcagggtcacgacgttgatctgcttatcagttctccgggagctgaaaaagagcaagaagaccaactcctgcagaaagtgatgaatctgtggaagaaacaagggttgttgctgtgtggtcgtctggaatggagtcagtgggaatgggggggttcgccttccggtaaggctgatgagggtgacgcggaggcgtcgtgctttctgatcctcaaactttatgatcatctggtgcgtaaaagtaaacgcaatatgccgactggttcgaacatgggcgagtccaaaccgtggaaagcaattaaagtagatctgctgcgttgcccccgcggcagttttgcgtttgcgatgttgcagtggaccggaagccgcatgttccgtcgtgatctgcgctggtacgccctggaagagaagaacatgatgctggacaatcattcgctgtatgacatgactcgtggtatccaactccctgctaaatcggaagaggaaattttcgaacatctggggcttgaatacctggaaccgttcgaacgtaacgca

SEQ ID NO: 4658 - protein, 528 aa, synthetic construct
  REGION 1..528: note = Variant of terminal deoxynucleotidyltransferase
MHHHHHGGSGSHGIRTIDSDFGKKQQKKGDNHDSSATYEIKFHEFVLFILEEKMGATRRTFLTDLARKKGFRVENELTDEVTHIVAENLSRSEVLAWLKEHKMEKTKQFELLDISWLIESMKVGKPVDTKGKYQLAESVEVSANPDPTEGRVNELPPTMKTVSPYACQRRTTLNNRNQRFTDSLGILREMYELKGNDDTALEFRRAISVLKSLPFEVRSLKDTEGLPWISDEVKGIMEEIIEVGESREVQAVLNDEWYQSFHAFTRVFGVGVKTADKWYRMGLRTLEDVRSSKTLKLTPWQKVGLLYYEDLARGVTRAEADAIWLLVQDAVATFDPDAIVEIVGGQRRGKPQGHDVDLLISSPGAEKEQEDQLLQKVMNLWKKQGLLLCGRLEWSQWEWGGSPSGKADEGDAEASCFLILKLYDHLVRKSKRNMPTGSNMGESKPWKAIKVDLLRCPRGSFAFAMLQWTGSRMFRRDLRWYALEEKNMMLDNHSLYDMTRGIQLPAKSEEEIFEHLGLEYLEPFERNA

SEQ ID NO: 4659 - DNA, 1584 bp, synthetic construct
  misc_feature 1..1584: note = Variant of terminal deoxynucleotidyltransferase
  source 1..1584: mol_type = other DNA
atgcaccatcatcatcatggcggtagcggcagccacggcattcgtaccatcgattcggacttcgggaagaaacagcagaaaaaaggcgataaccacgatagttccgccacttatgaaatcaaatttcacgagtttgtgctgttcattctcgaagaaaaaatgggtgcgacgcgtcgtacttttctgacagatttagcccgcaagaaagggttccgcgtcgagaatgaactgaccgacgaagttacccacatcgtggcagaaaatctgtcacgctctgaagtattggcttggctgaaagaacacaagatggagaagaccaagcaattcgaactgctggatattagctggcttatcgaaagcatgaaagttggtaaaccggtggacaccaaggggaaataccagttggcggaatcggttgaggtgagtgcgaacccagatccgacagaaggtcgtgtaaacgagctgcctcctactatgaaaaccgtttctccgtatgcgtgtcaacgccgcaccaccctgaacaaccgtaatcaacgttttacggactcgctggagattcttcgtgaaaattacgagctgaaaggcaacgacgatactgcgctggaatttcgtcgtgctatctccgtgctgaaaagccttccgtttgaggtacgtagcctgaaagacacggaaggattgccctggatcagtgatgaagtcaaagggattatggaagaaatcatcgaagtcggggagtcgcgtgaagtgcaggccgtgctcaatgatgagtggtatcaaagcttccacgcatttacgcgtgtctttggagtgggggtgaagacagcagacaagtggtaccgtctgggtctgcgcaccctcgaggatgttcgttccagcaagaccctgaagttgaccccgtggcagaaagtaggtctgctgtattatgaagatcttgctcgcggcgttacgcgtgccgaagctgacgcgatttggctgctggttcaggatgcagtcgcaactttcgacccggatgcgatcgtggagattgtcggtggacagcgtcgtgggaaacctcagggtcacgacgttgatctgcttatcagttctccgggagctgaaaaagagcaagaagaccaactcctgcagaaagtgatgaatctgtggaagaaacaagggttgttgctgtgtggtcgtctggaatggagtcagtgggaatgggggggttcgccttccggtaaggctgatgagggtgacgcggaggcgtcgtgctttctgatcctcaaactttatgatcatctggtgcgtaaaagtaaacgcaatatgccgactggttcgaacatgggcgagtccaaaccgtggaaagcaattaaagtagatctgctgcgttgcccccgcggcagttttgcgtttgcgatgttgcagtggaccggaagccgcatgttccgtcgtgatctgcgctggtacgccctggaagagaagaacatgatgctggacaatcattcgctgtatgacatgactcgtggtatccaactccctgctaaatcggaagaggaaattttcgaacatctggggcttgaatacctggaaccgttcgaacgtaacgca

SEQ ID NO: 4660 - protein, 528 aa, synthetic construct
  REGION 1..528: note = Variant of terminal deoxynucleotidyltransferase
MHHHHHGGSGSHGIRTIDSDFGKKQQKKGDNHDSSATYEIKFHEFVLFILEEKMGATRRTFLTDLARKKGFRVENELTDEVTHIVAENLSRSEVLAWLKEHKMEKTKQFELLDISWLIESMKVGKPVDTKGKYQLAESVEVSANPDPTEGRVNELPPTMKTVSPYACQRRTTLNNRNQRFTDSLEILRENYELKGNDDTALEFRRAISVLKSLPFEVRSLKDTEGLPWISDEVKGIMEEIIEVGESREVQAVLNDEWYQSFHAFTRVFGVGVKTADKWYRLGLRTLEDVRSSKTLKLTPWQKVGLLYYEDLARGVTRAEADAIWLLVQDAVATFDPDAIVEIVGGQRRGKPQGHDVDLLISSPGAEKEQEDQLLQKVMNLWKKQGLLLCGRLEWSQWEWGGSPSGKADEGDAEASCFLILKLYDHLVRKSKRNMPTGSNMGESKPWKAIKVDLLRCPRGSFAFAMLQWTGSRMFRRDLRWYALEEKNMMLDNHSLYDMTRGIQLPAKSEEEIFEHLGLEYLEPFERNA

SEQ ID NO: 4661 - DNA, 1584 bp, synthetic construct
  misc_feature 1..1584: note = Variant of terminal deoxynucleotidyltransferase
  source 1..1584: mol_type = other DNA
atgcaccatcatcatcatggcggtagcggcagccacggcattcgtaccatcgattcggacttcgggaagaaacagcagaaaaaaggcgataaccacgatagttccgccacttatgaaatcaaatttcacgagtttgtgctgttcattctcgaagaaaaaatgggtgcgacgcgtcgtacttttctgacagatttagcccgcaagaaagggttccgcgtcgagaatgaactgaccgacgaagttacccacatcgtggcagaaaatctgtcacgctctgaagtattggcttggctgaaagaacacaagatggagaagaccaagcaattcgaactgctggatattagctggcttatcgaaagcatgaaagttggtaaaccggtggacaccaaggggaaataccagttggcggaatcggttgaggtgagtgcgaacccagatccgacagaaggtcgtgtaaacgagctgcctcctactatgaaaaccgtttctccgtatgcgtgtcaacgccgcaccaccctgaacaaccgtaatcaacgttttacggactcgctggagattcttcgtcggatgtacgagctgaaaggcaacgacgatactgcgctggaatttcgtcgtgctatctccgtgctgaaaagccttccgtttgaggtacgtagcctgaaagacacggaaggattgccctggatcagtgatgaagtcaaagggattatggaagaaatcatcgaagtcggggagtcgcgtgaagtgcaggccgtgctcaatgatgagtggtatcaaagcttccacgcatttacgcgtgtctttggagtgggggtgaagacagcagacaagtggtaccgtatgggtctgcgcaccctcgaggatgttcgttccagcaagaccctgaagttgaccccgtggcagaaagtaggtctgctgtattatgaagatcttgctcgcggcgttacgcgtgccgaagctgacgcgatttggctgctggttcaggatgcagtcgcaactttcgacccggatgcgatcgtggagattgtcggtggacagcgtcgtgggaaacctcagggtcacgacgttgatctgcttatcagttctccgggagctgaaaaagagcaagaagaccaactcctgcagaaagtgatgaatctgtggaagaaacaagggttgttgctgtgtggtcgtctggaatggagtcagtgggaatgggggggttcgccttccggtaaggctgatgagggtgacgcggaggcgtcgtgctttctgatcctcaaactttatgatcatctggtgcgtaaaagtaaacgcaatatgccgactggttcgaacatgggcgagtccaaaccgtggaaagcaattaaagtagatctgctgcgttgcccccgcggcagttttgcgtttgcgatgttgcagtggaccggaagccgcatgttccgtcgtgatctgcgctggtacgccctggaagagaagaacatgatgctggacaatcattcgctgtatgacatgactcgtggtatccaactccctgctaaatcggaagaggaaattttcgaacatctggggcttgaatacctggaaccgttcgaacgtaacgca

SEQ ID NO: 4662 - protein, 528 aa, synthetic construct
  REGION 1..528: note = Variant of terminal deoxynucleotidyltransferase
MHHHHHGGSGSHGIRTIDSDFGKKQQKKGDNHDSSATYEIKFHEFVLFILEEKMGATRRTFLTDLARKKGFRVENELTDEVTHIVAENLSRSEVLAWLKEHKMEKTKQFELLDISWLIESMKVGKPVDTKGKYQLAESVEVSANPDPTEGRVNELPPTMKTVSPYACQRRTTLNNRNQRFTDSLEILRRMYELKGNDDTALEFRRAISVLKSLPFEVRSLKDTEGLPWISDEVKGIMEEIIEVGESREVQAVLNDEWYQSFHAFTRVFGVGVKTADKWYRMGLRTLEDVRSSKTLKLTPWQKVGLLYYEDLARGVTRAEADAIWLLVQDAVATFDPDAIVEIVGGQRRGKPQGHDVDLLISSPGAEKEQEDQLLQKVMNLWKKQGLLLCGRLEWSQWEWGGSPSGKADEGDAEASCFLILKLYDHLVRKSKRNMPTGSNMGESKPWKAIKVDLLRCPRGSFAFAMLQWTGSRMFRRDLRWYALEEKNMMLDNHSLYDMTRGIQLPAKSEEEIFEHLGLEYLEPFERNA

SEQ ID NO: 4663 - DNA, 1584 bp, synthetic construct
  misc_feature 1..1584: note = Variant of terminal deoxynucleotidyltransferase
  source 1..1584: mol_type = other DNA
atgcaccatcatcatcatggcggtagcggcagccacggcattcgtaccatcgattcggacttcgggaagaaacagcagaaaaaaggcgataaccacgatagttccgccacttatgaaatcaaatttcacgagtttgtgctgttcattctcgaagaaaaaatgggtgcgacgcgtcgtacttttctgacagatttagcccgcaagaaagggttccgcgtcgagaatgaactgaccgacgaagttacccacatcgtggcagaaaatctgtcacgctctgaagtattggcttggctgaaagaacacaagatggagaagaccaagcaattcgaactgctggatattagctggcttatcgaaagcatgaaagttggtaaaccggtggacaccaaggggaaataccagttggcggaatcggttgaggtgagtgcgaacccagatccgacagaaggtcgtgtaaacgagctgcctcctactatgaaaaccgtttctccgtatgcgtgtcaacgccgcaccaccctgaacaaccgtaatcaacgttttacggactcgctggagattcttcgtgaaaattacgagctgaaaggcaacgacgatactgcgctggaatttcgtcgtgctatctccgtgctgaaaagccttccgtttgaggtacgtagcctgaaagacacggaaggattgccctggatcagtgatgaagtcaaagggattatggaagaaatcatcgaagtcggggagtcgcgtgaagtgcaggccgtgctcaatgatgagtggtatcaaagcttccacgcatttacgcgtgtctttggagtgggggtgaagacagcagacaagtggtaccgtatgggtctgcgcaccctcgaggatgttcgttccagcaagaccctgaagttgaccccgtggcagaaagtaggtctgctgtattatgaagatcttgctcgcggcgttacgcgtgccgaagctgacgcgatttggctgctggttcaggatgcagtcgcaactttcgacccggatgcgatcgtggagattgtcggtggacagcgtcgtgggaaacctcagggtcacgacgttgatctgcttatcagttctccgggagctgaaaaagagcaagaagaccaactcctgcagaaagtgatgaatctgtggaagaaacaagggttgttgctgtgtggtcgtctggaaatgagtcagtgggaatgggggggttcgccttccggtaaggctgatgagggtgacgcggaggcgtcgtgctttctgatcctcaaactttatgatcatctggtgcgtaaaagtaaacgcaatatgccgactggttcgaacatgggcgagtccaaaccgtggaaagcaattaaagtagatctgctgcgttgcccccgcggcagttttgcgtttgcgatgttgcagtggaccggaagccgcatgttccgtcgtgatctgcgctggtacgccctggaagagaagaacatgatgctggacaatcattcgctgtatgacatgactcgtggtatccaactccctgctaaatcggaagaggaaattttcgaacatctggggcttgaatacctggaaccgttcgaacgtaacgca

SEQ ID NO: 4664 - protein, 528 aa, synthetic construct
  REGION 1..528: note = Variant of terminal deoxynucleotidyltransferase
MHHHHHGGSGSHGIRTIDSDFGKKQQKKGDNHDSSATYEIKFHEFVLFILEEKMGATRRTFLTDLARKKGFRVENELTDEVTHIVAENLSRSEVLAWLKEHKMEKTKQFELLDISWLIESMKVGKPVDTKGKYQLAESVEVSANPDPTEGRVNELPPTMKTVSPYACQRRTTLNNRNQRFTDSLEILRENYELKGNDDTALEFRRAISVLKSLPFEVRSLKDTEGLPWISDEVKGIMEEIIEVGESREVQAVLNDEWYQSFHAFTRVFGVGVKTADKWYRMGLRTLEDVRSSKTLKLTPWQKVGLLYYEDLARGVTRAEADAIWLLVQDAVATFDPDAIVEIVGGQRRGKPQGHDVDLLISSPGAEKEQEDQLLQKVMNLWKKQGLLLCGRLEMSQWEWGGSPSGKADEGDAEASCFLILKLYDHLVRKSKRNMPTGSNMGESKPWKAIKVDLLRCPRGSFAFAMLQWTGSRMFRRDLRWYALEEKNMMLDNHSLYDMTRGIQLPAKSEEEIFEHLGLEYLEPFERNA

SEQ ID NO: 4665 - DNA, 1584 bp, synthetic construct
  misc_feature 1..1584: note = Variant of terminal deoxynucleotidyltransferase
  source 1..1584: mol_type = other DNA
atgcaccatcatcatcatggcggtagcggcagccacggcattcgtaccatcgattcggacttcgggaagaaacagcagaaaaaaggcgataaccacgatagttccgccacttatgaaatcaaatttcacgagtttgtgctgttcattctcgaagaaaaaatgggtgcgacgcgtcgtacttttctgacagatttagcccgcaagaaagggttccgcgtcgagaatgaactgaccgacgaagttacccacatcgtggcagaaaatctgtcacgctctgaagtattggcttggctgaaagaacacaagatggagaagaccaagcaattcgaactgctggatattagctggcttatcgaaagcatgaaagttggtaaaccggtggacaccaaggggaaataccagttggcggaatcggttgaggtgagtgcgaacccagatccgacagaaggtcgtgtaaacgagctgcctcctactatgaaaaccgtttctccgtatgcgtgtcaacgccgcaccaccctgaacaaccgtaatcaacgttttacggactcgctggagattcttcgtgaaaattacgagctgaaaggcaacgacgatactgcgctggaatttcgtcgtgctatctccgtgctgaaaagccttccgtttgaggtacgtagcctgaaagacacggaaggattgccctggatcagtgatgaagtcaaagggattatggaagaaatcatcgaagtcggggagtcgcgtgaagtgcaggccgtgctcaatgatgagtggtatcaaagcttccacgcatttacgcgtgtctttggagtgggggtgaagacagcagacaagtggtaccgtatgggtctgcgcaccctcgaggatgttcgttccagcaagaccctgaagttgaccccgtggcagaaagtaggtctgctgtattatgaagatcttgctgctggcgttacgcgtgccgaagctgacgcgatttggctgctggttcaggatgcagtcgcaactttcgacccggatgcgatcgtggagattgtcggtggacagcgtcgtgggaaacctcagggtcacgacgttgatctgcttatcagttctccgggagctgaaaaagagcaagaagaccaactcctgcagaaagtgatgaatctgtggaagaaacaagggttgttgctgtgtggtcgtctggaatggagtcagtgggaatgggggggttcgccttccggtaaggctgatgagggtgacgcggaggcgtcgtgctttctgatcctcaaactttatgatcatctggtgcgtaaaagtaaacgcaatatgccgactggttcgaacatgggcgagtccaaaccgtggaaagcaattaaagtagatctgctgcgttgcccccgcggcagttttgcgtttgcgatgttgcagtggaccggaagccgcatgttccgtcgtgatctgcgctggtacgccctggaagagaagaacatgatgctggacaatcattcgctgtatgacatgactcgtggtatccaactccctgctaaatcggaagaggaaattttcgaacatctggggcttgaatacctggaaccgttcgaacgtaacgca

SEQ ID NO: 4666 - protein, 528 aa, synthetic construct
  REGION 1..528: note = Variant of terminal deoxynucleotidyltransferase
MHHHHHGGSGSHGIRTIDSDFGKKQQKKGDNHDSSATYEIKFHEFVLFILEEKMGATRRTFLTDLARKKGFRVENELTDEVTHIVAENLSRSEVLAWLKEHKMEKTKQFELLDISWLIESMKVGKPVDTKGKYQLAESVEVSANPDPTEGRVNELPPTMKTVSPYACQRRTTLNNRNQRFTDSLEILRENYELKGNDDTALEFRRAISVLKSLPFEVRSLKDTEGLPWISDEVKGIMEEIIEVGESREVQAVLNDEWYQSFHAFTRVFGVGVKTADKWYRMGLRTLEDVRSSKTLKLTPWQKVGLLYYEDLAAGVTRAEADAIWLLVQDAVATFDPDAIVEIVGGQRRGKPQGHDVDLLISSPGAEKEQEDQLLQKVMNLWKKQGLLLCGRLEWSQWEWGGSPSGKADEGDAEASCFLILKLYDHLVRKSKRNMPTGSNMGESKPWKAIKVDLLRCPRGSFAFAMLQWTGSRMFRRDLRWYALEEKNMMLDNHSLYDMTRGIQLPAKSEEEIFEHLGLEYLEPFERNA

SEQ ID NO: 4667 - DNA, 1584 bp, synthetic construct
  misc_feature 1..1584: note = Variant of terminal deoxynucleotidyltransferase
  source 1..1584: mol_type = other DNA
atgcaccatcatcatcatggcggtagcggcagccacggcattcgtaccatcgattcggacttcgggaagaaacagcagaaaaaaggcgataaccacgatagttccgccacttatgaaatcaaatttcacgagtttgtgctgttcattctcgaagaaaaaatgggtgcgacgcgtcgtacttttctgacagatttagcccgcaagaaagggttccgcgtcgagaatgaactgaccgacgaagttacccacatcgtggcagaaaatctgtcacgctctgaagtattggcttggctgaaagaacacaagatggagaagaccaagcaattcgaactgctggatattagctggcttatcgaaagcatgaaagttggtaaaccggtggacaccaaggggaaataccagttggcggaatcggttgaggtgagtgcgaacccagatccgacagaaggtcgtgtaaacgagctgcctcctactatgaaaaccgtttctccgtatgcgtgtcaacgccgcaccaccctgaacaaccgtaatcaacgttttacggactcgctggagattcttcgtgaaaattacgagctgaaaggcaacgacgatactgcgctggaatttcgtcgtgctatctccgtgctgaaaagccttccgtttgaggtacgtagcctgaaagacacggaaggattgccctggatcagtgatgaagtcaaagggattatggaagaaatcatcgaagtcggggagtcgcgtgaagtgcaggccgtgctcaatgatgagtggtatcaaagcttccacgcatttacgcgtgtctttggagtgggggtgaagacagcagacaagtggtaccgtatgggtctgcgcaccctcgaggatgttcgttccagcaagaccctgaagttgaccccgtggcagaaagtaggtctgctgtattatgaagatcttcagcgcggcgttacgcgtgccgaagctgacgcgatttggctgctggttcaggatgcagtcgcaactttcgacccggatgcgatcgtggagattgtcggtggacagcgtcgtgggaaacctcagggtcacgacgttgatctgcttatcagttctccgggagctgaaaaagagcaagaagaccaactcctgcagaaagtgatgaatctgtggaagaaacaagggttgttgctgtgtggtcgtctggaatggagtcagtgggaatgggggggttcgccttccggtaaggctgatgagggtgacgcggaggcgtcgtgctttctgatcctcaaactttatgatcatctggtgcgtaaaagtaaacgcaatatgccgactggttcgaacatgggcgagtccaaaccgtggaaagcaattaaagtagatctgctgcgttgcccccgcggcagttttgcgtttgcgatgttgcagtggaccggaagccgcatgttccgtcgtgatctgcgctggtacgccctggaagagaagaacatgatgctggacaatcattcgctgtatgacatgactcgtggtatccaactccctgctaaatcggaagaggaaattttcgaacatctggggcttgaatacctggaaccgttcgaacgtaacgca

SEQ ID NO: 4668 - protein, 528 aa, synthetic construct
  REGION 1..528: note = Variant of terminal deoxynucleotidyltransferase
MHHHHHGGSGSHGIRTIDSDFGKKQQKKGDNHDSSATYEIKFHEFVLFILEEKMGATRRTFLTDLARKKGFRVENELTDEVTHIVAENLSRSEVLAWLKEHKMEKTKQFELLDISWLIESMKVGKPVDTKGKYQLAESVEVSANPDPTEGRVNELPPTMKTVSPYACQRRTTLNNRNQRFTDSLEILRENYELKGNDDTALEFRRAISVLKSLPFEVRSLKDTEGLPWISDEVKGIMEEIIEVGESREVQAVLNDEWYQSFHAFTRVFGVGVKTADKWYRMGLRTLEDVRSSKTLKLTPWQKVGLLYYEDLQRGVTRAEADAIWLLVQDAVATFDPDAIVEIVGGQRRGKPQGHDVDLLISSPGAEKEQEDQLLQKVMNLWKKQGLLLCGRLEWSQWEWGGSPSGKADEGDAEASCFLILKLYDHLVRKSKRNMPTGSNMGESKPWKAIKVDLLRCPRGSFAFAMLQWTGSRMFRRDLRWYALEEKNMMLDNHSLYDMTRGIQLPAKSEEEIFEHLGLEYLEPFERNA

SEQ ID NO: 4669 - DNA, 1584 bp, synthetic construct
  misc_feature 1..1584: note = Variant of terminal deoxynucleotidyltransferase
  source 1..1584: mol_type = other DNA
atgcaccatcatcatcatggcggtagcggcagccacggcattcgtaccatcgattcggacttcgggaagaaacagcagaaaaaaggcgataaccacgatagttccgccacttatgaaatcaaatttcacgagtttgtgctgttcattctcgaagaaaaaatgggtgcgacgcgtcgtacttttctgacagatttagcccgcaagaaagggttccgcgtcgagaatgaactgaccgacgaagttacccacatcgtggcagaaaatctgtcacgctctgaagtattggcttggctgaaagaacacaagatggagaagaccaagcaattcgaactgctggatattagctggcttatcgaaagcatgaaagttggtaaaccggtggacaccaaggggaaataccagttggcggaatcggttgaggtgagtgcgaacccagatccgacagaaggtcgtgtaaacgagctgcctcctactatgaaaaccgtttctccgtatgcgtgtcaacgccgcaccaccctgaacaaccgtaatcaacgttttacgaattcgctggagattcttcgtgaaaattacgagctgaaaggcaacgacgatactgcgctggaatttcgtcgtgctatctccgtgctgaaaagccttccgtttgaggtacgtagcctgaaagacacggaaggattgccctggatcagtgatgaagtcaaagggattatggaagaaatcatcgaagtcggggagtcgcgtgaagtgcaggccgtgctcaatgatgagtggtatcaaagcttccacgcatttacgcgtgtctttggagtgggggtgaagacagcagacaagtggtaccgtatgggtctgcgcaccctcgaggatgttcgttccagcaagaccctgaagttgaccccgtggcagaaagtaggtctgctgtattatgaagatcttgctcgcggcgttacgcgtgccgaagctgacgcgatttggctgctggttcaggatgcagtcgcaactttcgacccggatgcgatcgtggagattgtcggtggacagcgtcgtgggaaacctcagggtcacgacgttgatctgcttatcagttctccgggagctgaaaaagagcaagaagaccaactcctgcagaaagtgatgaatctgtggaagaaacaagggttgttgctgtgtggtcgtctggaatggagtcagtgggaatgggggggttcgccttccggtaaggctgatgagggtgacgcggaggcgtcgtgctttctgatcctcaaactttatgatcatctggtgcgtaaaagtaaacgcaatatgccgactggttcgaacatgggcgagtccaaaccgtggaaagcaattaaagtagatctgctgcgttgcccccgcggcagttttgcgtttgcgatgttgcagtggaccggaagccgcatgttccgtcgtgatctgcgctggtacgccctggaagagaagaacatgatgctggacaatcattcgctgtatgacatgactcgtggtatccaactccctgctaaatcggaagaggaaattttcgaacatctggggcttgaatacctggaaccgttcgaacgtaacgca

SEQ ID NO: 4670 - protein, 528 aa, synthetic construct
  REGION 1..528: note = Variant of terminal deoxynucleotidyltransferase
MHHHHHGGSGSHGIRTIDSDFGKKQQKKGDNHDSSATYEIKFHEFVLFILEEKMGATRRTFLTDLARKKGFRVENELTDEVTHIVAENLSRSEVLAWLKEHKMEKTKQFELLDISWLIESMKVGKPVDTKGKYQLAESVEVSANPDPTEGRVNELPPTMKTVSPYACQRRTTLNNRNQRFTNSLEILRENYELKGNDDTALEFRRAISVLKSLPFEVRSLKDTEGLPWISDEVKGIMEEIIEVGESREVQAVLNDEWYQSFHAFTRVFGVGVKTADKWYRMGLRTLEDVRSSKTLKLTPWQKVGLLYYEDLARGVTRAEADAIWLLVQDAVATFDPDAIVEIVGGQRRGKPQGHDVDLLISSPGAEKEQEDQLLQKVMNLWKKQGLLLCGRLEWSQWEWGGSPSGKADEGDAEASCFLILKLYDHLVRKSKRNMPTGSNMGESKPWKAIKVDLLRCPRGSFAFAMLQWTGSRMFRRDLRWYALEEKNMMLDNHSLYDMTRGIQLPAKSEEEIFEHLGLEYLEPFERNA

SEQ ID NO: 4671 - DNA, 1584 bp, synthetic construct
  misc_feature 1..1584: note = Variant of terminal deoxynucleotidyltransferase
  source 1..1584: mol_type = other DNA
atgcaccatcatcatcatggcggtagcggcagccacggcattcgtaccatcgattcggacttcgggaagaaacagcagaaaaaaggcgataaccacgatagttccgccacttatgaaatcaaatttcacgagtttgtgctgttcattctcgaagaaaaaatgggtgcgacgcgtcgtacttttctgacagatttagcccgcaagaaagggttccgcgtcgagaatgaactgaccgacgaagttacccacatcgtggcagaaaatctgtcacgctctgaagtattggcttggctgaaagaacacaagatggagaagaccaagcaattcgaactgctggatattagctggcttatcgaaagcatgaaagttggtaaaccggtggacaccaaggggaaataccagttggcggaatcggttgaggtgagtgcgaacccagatccgacagaaggtcgtgtaaacgagctgcctcctactatgaaaaccgtttctccgtatgcgtgtcaacgccgcaccaccctgaacaaccgtaatcaacgttttacggactcgctggagattcttcgtgaaaattacgagctgaaaggcaacgacgatactgcgctggaatttcgtcgtgctatctccgtgctgaaaagccttccgtttgaggtacgtagcctgaaagacacggaaggattgccctggatcagtgatgaagtcaaagggattatggaagaaatcatcgaagtcggggagtcgcgtgaagtgcaggccgtgctcaatgatgagtggtatcaaagcttccacgcatttacgcgtgtctttggagtgggggtgaagacagcagacaagtggtaccgtatgggtctgcgcaccctcgaggatgttcgttccagcaagaccctgaagttgaccccgtggcagaaagtaggtctgctgtattatgaagatcttgctcgcggcgttacgcgtgccgaagctgacgcgatttggctgctggttcaggatgcagtcgcaactttcgacccggatgcgatcgtggagattgtcggtggacagcgtcgtgggaaacctcagggtcacgacgttgatctgcttatcagttctccgggagctgaaaaagagcaagaagaccaactcctgcagaaagtgatgaatctgtggaagaaacaagggttgttgctgtgtggtcgtctggaatggagtcagtgggaatgggggggttcgccttccggtaaggctgatgagggtgacgcggaggcgtcgtgctttctgatcctcaaactttatgatcatctggtgcgtaaaagtaaacgcaatatgccgactggttcgaacatgggcgagtccaaaccgtggaaagcaattaaagtagatctgctgcgttgcccccgcggcagttttgcgtttgcgatgttgcagtggaccggaagccgcatgttccgtcgtgatctgcgcctttacgccctggaagagaagaacatgatgctggacaatcattcgctgtatgacatgactcgtggtatccaactccctgctaaatcggaagaggaaattttcgaacatctggggcttgaatacctggaaccgttcgaacgtaacgca

SEQ ID NO: 4672 - protein, 528 aa, synthetic construct
  REGION 1..528: note = Variant of terminal deoxynucleotidyltransferase
MHHHHHGGSGSHGIRTIDSDFGKKQQKKGDNHDSSATYEIKFHEFVLFILEEKMGATRRTFLTDLARKKGFRVENELTDEVTHIVAENLSRSEVLAWLKEHKMEKTKQFELLDISWLIESMKVGKPVDTKGKYQLAESVEVSANPDPTEGRVNELPPTMKTVSPYACQRRTTLNNRNQRFTDSLEILRENYELKGNDDTALEFRRAISVLKSLPFEVRSLKDTEGLPWISDEVKGIMEEIIEVGESREVQAVLNDEWYQSFHAFTRVFGVGVKTADKWYRMGLRTLEDVRSSKTLKLTPWQKVGLLYYEDLARGVTRAEADAIWLLVQDAVATFDPDAIVEIVGGQRRGKPQGHDVDLLISSPGAEKEQEDQLLQKVMNLWKKQGLLLCGRLEWSQWEWGGSPSGKADEGDAEASCFLILKLYDHLVRKSKRNMPTGSNMGESKPWKAIKVDLLRCPRGSFAFAMLQWTGSRMFRRDLRLYALEEKNMMLDNHSLYDMTRGIQLPAKSEEEIFEHLGLEYLEPFERNA

SEQ ID NO: 4673 - DNA, 1584 bp, synthetic construct
  misc_feature 1..1584: note = Variant of terminal deoxynucleotidyltransferase
  source 1..1584: mol_type = other DNA
atgcaccatcatcatcatggcggtagcggcagccacggcattcgtaccatcgattcggacttcgggaagaaacagcagaaaaaaggcgataaccacgatagttccgccacttatgaaatcaaatttcacgagtttgtgctgttcattctcgaagaaaaaatgggtgcgacgcgtcgtacttttctgacagatttagcccgcaagaaagggttccgcgtcgagaatgaactgaccgacgaagttacccacatcgtggcagaaaatctgtcacgctctgaagtattggcttggctgaaagaacacaagatggagaagaccaagcaattcgaactgctggatattagctggcttatcgaaagcatgaaagttggtaaaccggtggacaccaaggggaaataccagttggcggaatcggttgaggtgagtgcgaacccagatccgacagaaggtcgtgtaaacgagctgcctcctactatgaaaaccgtttctccgtatgcgtgtcaacgccgcaccaccctgatgaaccgtaatcaacgttttacggactcgctggagattcttcgtgaaaattacgagctgaaaggcaacgacgatactgcgctggaatttcgtcgtgctatctccgtgctgaaaagccttccgtttgaggtacgtagcctgaaagacacggaaggattgccctggatcagtgatgaagtcaaagggattatggaagaaatcatcgaagtcggggagtcgcgtgaagtgcaggccgtgctcaatgatgagtggtatcaaagcttccacgcatttacgcgtgtctttggagtgggggtgaagacagcagacaagtggtaccgtatgggtctgcgcaccctcgaggatgttcgttccagcaagaccctgcctttgaccgaatggcaaaaagtaggtctgctgtattatgaagatcttgctcgcggcgttacgcgtgccgaagctgacgcgatttggctgctggttcaggatgcagtcgcaactttcgacccggatgcgatcgtggagattgtgggtggacagcgtcgtgggaaacctcagggtcacgacgttgatctgcttatcagttctccgggagctgaaaaagagcaagaagaccaactcctgcagaaagtgatgaatctgtggaagaaacaagggttgttgctgtgtggtcgtctggaatggagtcagtgggaatgggggggttcgccttccggtaaggctgatgagggtgacgcggaggcgtcgtgctttctgatcctcaaactttatgatcatctggtgcgtaaaagtaaacgcaatatgccgactggttcgaacatgggcgagtccaaaccgtggaaagcaattaaagtagatctgctgcgttgcccccgcggcagttttgcgtttgcgatgttgcagtggaccggaagccgcatgttccgtcgtgatctgcgctggtacgccctggaagagaagaacatgatgctggacaatcattcgctgtatgacatgactcgtggtatccaactccctgctaaatcggaagaggaaattttcgaacatctggggcttgaatacctggaaccgttcgaacgtaacgca

SEQ ID NO: 4674 - protein, 528 aa, synthetic construct
  REGION 1..528: note = Variant of terminal deoxynucleotidyltransferase
MHHHHHGGSGSHGIRTIDSDFGKKQQKKGDNHDSSATYEIKFHEFVLFILEEKMGATRRTFLTDLARKKGFRVENELTDEVTHIVAENLSRSEVLAWLKEHKMEKTKQFELLDISWLIESMKVGKPVDTKGKYQLAESVEVSANPDPTEGRVNELPPTMKTVSPYACQRRTTLMNRNQRFTDSLEILRENYELKGNDDTALEFRRAISVLKSLPFEVRSLKDTEGLPWISDEVKGIMEEIIEVGESREVQAVLNDEWYQSFHAFTRVFGVGVKTADKWYRMGLRTLEDVRSSKTLPLTEWQKVGLLYYEDLARGVTRAEADAIWLLVQDAVATFDPDAIVEIVGGQRRGKPQGHDVDLLISSPGAEKEQEDQLLQKVMNLWKKQGLLLCGRLEWSQWEWGGSPSGKADEGDAEASCFLILKLYDHLVRKSKRNMPTGSNMGESKPWKAIKVDLLRCPRGSFAFAMLQWTGSRMFRRDLRWYALEEKNMMLDNHSLYDMTRGIQLPAKSEEEIFEHLGLEYLEPFERNA

SEQ ID NO: 4675 - DNA, 1584 bp, synthetic construct
  misc_feature 1..1584: note = Variant of terminal deoxynucleotidyltransferase
  source 1..1584: mol_type = other DNA
atgcaccatcatcatcatggcggtagcggcagccacggcattcgtaccatcgattcggacttcgggaagaaacagcagaaaaaaggcgataaccacgatagttccgccacttatgaaatcaaatttcacgagtttgtgctgttcattctcgaagaaaaaatgggtgcgacgcgtcgtacttttctgacagatttagcccgcaagaaagggttccgcgtcgagaatgaactgaccgacgaagttacccacatcgtggcagaaaatctgtcacgctctgaagtattggcttggctgaaagaacacaagatggagaagaccaagcaattcgaactgctggatattagctggcttatcgaaagcatgaaagttggtaaaccggtggacaccaaggggaaataccagttggcggaatcggttgaggtgagtgcgaacccagatccgacagaaggtcgtgtaaacgagctgcctcctactatgaaaaccgtttctccgtatgcgtgtcaacgccgcaccaccctgaacaaccgtaatcaacgttttacggactcgctggagattcttcgtgaaaattacgagctgaaaggcaacgacgatactgcgctggaatttcgtcgtgctatctccgtgctgaaaagccttccgtttgaggtacgtagcctgaaagacacggaaggattgccctggatcagtgatgaagtcaaagggattatggaagaaatcatcgaagtcggggagtcgcgtgaagtgcaggccgtgctcaatgatgagtggtatcaaagcttccacgcatttacgcgtgtctttggagtgggggtgaagacagcagacaagtggtaccgtatgggtctgcgcaccctcgaggatgttcgttccagcaagaccctgaagttgaccccgtggcagaaagtaggtctgctgtattatgaagatcttgctattggcgttacgcgtgccgaagctgacgcgatttggctgctggttcaggatgcagtcgcaactttcgacccggatgcgatcgtggagattgtcggtggacagcgtcgtgggaaacctcagggtcacgacgttgatctgcttatcagttctccgggagctgaaaaagagcaagaagaccaactcctgcagaaagtgatgaatctgtggaagaaacaagggttgttgctgtgtggtcgtctggaatggagtcagtgggaatgggggggttcgccttccggtaaggctgatgagggtgacgcggaggcgtcgtgctttctgatcctcaaactttatgatcatctggtgcgtaaaagtaaacgcaatatgccgactggttcgaacatgggcgagtccaaaccgtggaaagcaattaaagtagatctgctgcgttgcccccgcggcagttttgcgtttgcgatgttgcagtggaccggaagccgcatgttccgtcgtgatctgcgctggtacgccctggaagagaagaacatgatgctggacaatcattcgctgtatgacatgactcgtggtatccaactccctgctaaatcggaagaggaaattttcgaacatctggggcttgaatacctggaaccgttcgaacgtaacgca

SEQ ID NO: 4676 - protein, 528 aa, synthetic construct
  REGION 1..528: note = Variant of terminal deoxynucleotidyltransferase
MHHHHHGGSGSHGIRTIDSDFGKKQQKKGDNHDSSATYEIKFHEFVLFILEEKMGATRRTFLTDLARKKGFRVENELTDEVTHIVAENLSRSEVLAWLKEHKMEKTKQFELLDISWLIESMKVGKPVDTKGKYQLAESVEVSANPDPTEGRVNELPPTMKTVSPYACQRRTTLNNRNQRFTDSLEILRENYELKGNDDTALEFRRAISVLKSLPFEVRSLKDTEGLPWISDEVKGIMEEIIEVGESREVQAVLNDEWYQSFHAFTRVFGVGVKTADKWYRMGLRTLEDVRSSKTLKLTPWQKVGLLYYEDLAIGVTRAEADAIWLLVQDAVATFDPDAIVEIVGGQRRGKPQGHDVDLLISSPGAEKEQEDQLLQKVMNLWKKQGLLLCGRLEWSQWEWGGSPSGKADEGDAEASCFLILKLYDHLVRKSKRNMPTGSNMGESKPWKAIKVDLLRCPRGSFAFAMLQWTGSRMFRRDLRWYALEEKNMMLDNHSLYDMTRGIQLPAKSEEEIFEHLGLEYLEPFERNA

SEQ ID NO: 4677 - DNA, 1584 bp, synthetic construct
  misc_feature 1..1584: note = Variant of terminal deoxynucleotidyltransferase
  source 1..1584: mol_type = other DNA
atgcaccatcatcatcatggcggtagcggcagccacggcattcgtaccatcgattcggacttcgggaagaaacagcagaaaaaaggcgataaccacgatagttccgccacttatgaaatcaaatttcacgagtttgtgctgttcattctcgaagaaaaaatgggtgcgacgcgtcgtacttttctgacagatttagcccgcaagaaagggttccgcgtcgagaatgaactgaccgacgaagttacccacatcgtggcagaaaatctgtcacgctctgaagtattggcttggctgaaagaacacaagatggagaagaccaagcaattcgaactgctggatattagctggcttatcgaaagcatgaaagttggtaaaccggtggacaccaaggggaaataccagttggcggaatcggttgaggtgagtgcgaacccagatccgacagaaggtcgtgtaaacgagctgcctcctactatgaaaaccgtttctccgtatgcgtgtcaacgccgcaccaccctgaacaaccgtaatcaacgttttacggactcgctggagattcttcgtcatatgtacgagctgaaaggcaacgacgatactgcgctggaatttcgtcgtgctatctccgtgctgaaaagccttccgtttgaggtacgtagcctgaaagacacggaaggattgccctggatcagtgatgaagtcaaagggattatggaagaaatcatcgaagtcggggagtcgcgtgaagtgcaggccgtgctcaatgatgagtggtatcaaagcttccacgcatttacgcgtgtctttggagtgggggtgaagacagcagacaagtggtaccgtatgggtctgcgcaccctcgaggatgttcgttccagcaagaccctgaagttgaccccgtggcagaaagtaggtctgctgtattatgaagatcttgctcgcggcgttacgcgtgccgaagctgacgcgatttggctgctggttcaggatgcagtcgcaactttcgacccggatgcgatcgtggagattgtcggtggacagcgtcgtgggaaacctcagggtcacgacgttgatctgcttatcagttctccgggagctgaaaaagagcaagaagaccaactcctgcagaaagtgatgaatctgtggaagaaacaagggttgttgctgtgtggtcgtctggaatggagtcagtgggaatgggggggttcgccttccggtaaggctgatgagggtgacgcggaggcgtcgtgctttctgatcctcaaactttatgatcatctggtgcgtaaaagtaaacgcaatatgccgactggttcgaacatgggcgagtccaaaccgtggaaagcaattaaagtagatctgctgcgttgcccccgcggcagttttgcgtttgcgatgttgcagtggaccggaagccgcatgttccgtcgtgatctgcgctggtacgccctggaagagaagaacatgatgctggacaatcattcgctgtatgacatgactcgtggtatccaactccctgctaaatcggaagaggaaattttcgaacatctggggcttgaatacctggaaccgttcgaacgtaacgca

SEQ ID NO: 4678 - protein, 528 aa, synthetic construct
  REGION 1..528: note = Variant of terminal deoxynucleotidyltransferase
MHHHHHGGSGSHGIRTIDSDFGKKQQKKGDNHDSSATYEIKFHEFVLFILEEKMGATRRTFLTDLARKKGFRVENELTDEVTHIVAENLSRSEVLAWLKEHKMEKTKQFELLDISWLIESMKVGKPVDTKGKYQLAESVEVSANPDPTEGRVNELPPTMKTVSPYACQRRTTLNNRNQRFTDSLEILRHMYELKGNDDTALEFRRAISVLKSLPFEVRSLKDTEGLPWISDEVKGIMEEIIEVGESREVQAVLNDEWYQSFHAFTRVFGVGVKTADKWYRMGLRTLEDVRSSKTLKLTPWQKVGLLYYEDLARGVTRAEADAIWLLVQDAVATFDPDAIVEIVGGQRRGKPQGHDVDLLISSPGAEKEQEDQLLQKVMNLWKKQGLLLCGRLEWSQWEWGGSPSGKADEGDAEASCFLILKLYDHLVRKSKRNMPTGSNMGESKPWKAIKVDLLRCPRGSFAFAMLQWTGSRMFRRDLRWYALEEKNMMLDNHSLYDMTRGIQLPAKSEEEIFEHLGLEYLEPFERNA

SEQ ID NO: 4679 - DNA, 1584 bp, synthetic construct
  misc_feature 1..1584: note = Variant of terminal deoxynucleotidyltransferase
  source 1..1584: mol_type = other DNA
atgcaccatcatcatcatggcggtagcggcagccacggcattcgtaccatcgattcggacttcgggaagaaacagcagaaaaaaggcgataaccacgatagttccgccacttatgaaatcaaatttcacgagtttgtgctgttcattctcgaagaaaaaatgggtgcgacgcgtcgtacttttctgacagatttagcccgcaagaaagggttccgcgtcgagaatgaactgaccgacgaagttacccacatcgtggcagaaaatctgtcacgctctgaagtattggcttggctgaaagaacacaagatggagaagaccaagcaattcgaactgctggatattagctggcttatcgaaagcatgaaagttggtaaaccggtggacaccaaggggaaataccagttggcggaatcggttgaggtgagtgcgaacccagatccgacagaaggtcgtgtaaacgagctgcctcctactatgaaaaccgtttctccgtatgcgtgtcaacgccgcaccaccctgaacaaccgtaatcaacgttttacgcggtcgctggagattcttcgtgaaaattacgagctgaaaggcaacgacgatactgcgctggaatttcgtcgtgctatctccgtgctgaaaagccttccgtttgaggtacgtagcctgaaagacacggaaggattgccctggatcagtgatgaagtcaaagggattatggaagaaatcatcgaagtcggggagtcgcgtgaagtgcaggccgtgctcaatgatgagtggtatcaaagcttccacgcatttacgcgtgtctttggagtgggggtgaagacagcagacaagtggtaccgtatgggtctgcgcaccctcgaggatgttcgttccagcaagaccctgaagttgaccccgtggcagaaagtaggtctgctgtattatgaagatcttgctcgcggcgttacgcgtgccgaagctgacgcgatttggctgctggttcaggatgcagtcgcaactttcgacccggatgcgatcgtggagattgtcggtggacagcgtcgtgggaaacctcagggtcacgacgttgatctgcttatcagttctccgggagctgaaaaagagcaagaagaccaactcctgcagaaagtgatgaatctgtggaagaaacaagggttgttgctgtgtggtcgtctggaatggagtcagtgggaatgggggggttcgccttccggtaaggctgatgagggtgacgcggaggcgtcgtgctttctgatcctcaaactttatgatcatctggtgcgtaaaagtaaacgcaatatgccgactggttcgaacatgggcgagtccaaaccgtggaaagcaattaaagtagatctgctgcgttgcccccgcggcagttttgcgtttgcgatgttgcagtggaccggaagccgcatgttccgtcgtgatctgcgctggtacgccctggaagagaagaacatgatgctggacaatcattcgctgtatgacatgactcgtggtatccaactccctgctaaatcggaagaggaaattttcgaacatctggggcttgaatacctggaaccgttcgaacgtaacgca

SEQ ID NO: 4680 - protein, 528 aa, synthetic construct
  REGION 1..528: note = Variant of terminal deoxynucleotidyltransferase
MHHHHHGGSGSHGIRTIDSDFGKKQQKKGDNHDSSATYEIKFHEFVLFILEEKMGATRRTFLTDLARKKGFRVENELTDEVTHIVAENLSRSEVLAWLKEHKMEKTKQFELLDISWLIESMKVGKPVDTKGKYQLAESVEVSANPDPTEGRVNELPPTMKTVSPYACQRRTTLNNRNQRFTRSLEILRENYELKGNDDTALEFRRAISVLKSLPFEVRSLKDTEGLPWISDEVKGIMEEIIEVGESREVQAVLNDEWYQSFHAFTRVFGVGVKTADKWYRMGLRTLEDVRSSKTLKLTPWQKVGLLYYEDLARGVTRAEADAIWLLVQDAVATFDPDAIVEIVGGQRRGKPQGHDVDLLISSPGAEKEQEDQLLQKVMNLWKKQGLLLCGRLEWSQWEWGGSPSGKADEGDAEASCFLILKLYDHLVRKSKRNMPTGSNMGESKPWKAIKVDLLRCPRGSFAFAMLQWTGSRMFRRDLRWYALEEKNMMLDNHSLYDMTRGIQLPAKSEEEIFEHLGLEYLEPFERNA

SEQ ID NO: 4681 - DNA, 1584 bp, synthetic construct
  misc_feature 1..1584: note = Variant of terminal deoxynucleotidyltransferase
  source 1..1584: mol_type = other DNA
atgcaccatcatcatcatggcggtagcggcagccacggcattcgtaccatcgattcggacttcgggaagaaacagcagaaaaaaggcgataaccacgatagttccgccacttatgaaatcaaatttcacgagtttgtgctgttcattctcgaagaaaaaatgggtgcgacgcgtcgtacttttctgacagatttagcccgcaagaaagggttccgcgtcgagaatgaactgaccgacgaagttacccacatcgtggcagaaaatctgtcacgctctgaagtattggcttggctgaaagaacacaagatggagaagaccaagcaattcgaactgctggatattagctggcttatcgaaagcatgaaagttggtaaaccggtggacaccaaggggaaataccagttggcggaatcggttgaggtgagtgcgaacccagatccgacagaaggtcgtgtaaacgagctgcctcctactatgaaaaccgtttctccgtatgcgtgtcaacgccgcaccaccctgaacaaccgtaatcaacgttttacggactcgctggagattcttcgtgaaaattacgagctgaaaggcaacgacgatactgcgctggaatttcgtcgtgctatctccgtgctgaaaagccttccgtttgaggtacgtagcctgaaagacacggaaggattgccctggatcagtgatgaagtcaaagggattatggaagaaatcatcgaagtcggggagtcgcgtgaagtgcaggccgtgctcaatgatgagtggtatcaaagcttccacgcatttacgcgtgtctttggagtgggggtgaagacagcagacaagtggtaccgtatgggtctgcgcaccctcgaggatgttcgttccagcaagaccctgaagttgaccccgtggcagaaagtaggtctgctgtattatgaagatcttgctcgcggcgttacgcgtgttgaagctgacgcgatttggctgctggttcaggatgcagtcgcaactttcgacccggatgcgatcgtggagattgtcggtggacagcgtcgtgggaaacctcagggtcacgacgttgatctgcttatcagttctccgggagctgaaaaagagcaagaagaccaactcctgcagaaagtgatgaatctgtggaagaaacaagggttgttgctgtgtggtcgtctggaatggagtcagtgggaatgggggggttcgccttccggtaaggctgatgagggtgacgcggaggcgtcgtgctttctgatcctcaaactttatgatcatctggtgcgtaaaagtaaacgcaatatgccgactggttcgaacatgggcgagtccaaaccgtggaaagcaattaaagtagatctgctgcgttgcccccgcggcagttttgcgtttgcgatgttgcagtggaccggaagccgcatgttccgtcgtgatctgcgctggtacgccctggaagagaagaacatgatgctggacaatcattcgctgtatgacatgactcgtggtatccaactccctgctaaatcggaagaggaaattttcgaacatctggggcttgaatacctggaaccgttcgaacgtaacgca

SEQ ID NO: 4682 - protein, 528 aa, synthetic construct
  REGION 1..528: note = Variant of terminal deoxynucleotidyltransferase
MHHHHHGGSGSHGIRTIDSDFGKKQQKKGDNHDSSATYEIKFHEFVLFILEEKMGATRRTFLTDLARKKGFRVENELTDEVTHIVAENLSRSEVLAWLKEHKMEKTKQFELLDISWLIESMKVGKPVDTKGKYQLAESVEVSANPDPTEGRVNELPPTMKTVSPYACQRRTTLNNRNQRFTDSLEILRENYELKGNDDTALEFRRAISVLKSLPFEVRSLKDTEGLPWISDEVKGIMEEIIEVGESREVQAVLNDEWYQSFHAFTRVFGVGVKTADKWYRMGLRTLEDVRSSKTLKLTPWQKVGLLYYEDLARGVTRVEADAIWLLVQDAVATFDPDAIVEIVGGQRRGKPQGHDVDLLISSPGAEKEQEDQLLQKVMNLWKKQGLLLCGRLEWSQWEWGGSPSGKADEGDAEASCFLILKLYDHLVRKSKRNMPTGSNMGESKPWKAIKVDLLRCPRGSFAFAMLQWTGSRMFRRDLRWYALEEKNMMLDNHSLYDMTRGIQLPAKSEEEIFEHLGLEYLEPFERNA

SEQ ID NO: 4683 - DNA, 1584 bp, synthetic construct
  misc_feature 1..1584: note = Variant of terminal deoxynucleotidyltransferase
  source 1..1584: mol_type = other DNA
atgcaccatcatcatcatggcggtagcggcagccacggcattcgtaccatcgattcggacttcgggaagaaacagcagaaaaaaggcgataaccacgatagttccgccacttatgaaatcaaatttcacgagtttgtgctgttcattctcgaagaaaaaatgggtgcgacgcgtcgtacttttctgacagatttagcccgcaagaaagggttccgcgtcgagaatgaactgaccgacgaagttacccacatcgtggcagaaaatctgtcacgctctgaagtattggcttggctgaaagaacacaagatggagaagaccaagcaattcgaactgctggatattagctggcttatcgaaagcatgaaagttggtaaaccggtggacaccaaggggaaataccagttggcggaatcggttgaggtgagtgcgaacccagatccgacagaaggtcgtgtaaacgagctgcctcctactatgaaaaccgtttctccgtatgcgtgtcaacgccgcaccaccctgaacaaccgtaatcaacgttttacggactcgctggagattcttcgtgaaaattacgagctgaaaggcaacgacgatactgcgctggaatttcgtcgtgctatctccgtgctgaaaagccttccgtttgaggtacgtagcctgaaagacacggaaggattgccctggatcagtgatgaagtcaaagggattatggaagaaatcatcgaagtcggggagtcgcgtgaagtgcaggccgtgctcaatgatgagtggtatcaaagcttccacgcatttacgcgtgtctttggagtgggggtgaagacagcagacaagtggtaccgtatgggtctgcgcaccctcgaggatgttcgttccagcaagaccctgaagttgaccccgtggcagaaagtaggtctgctgtattacgaagatcttgctcgcggcgttacgcgtgccgaagctgacgcgatttggctgctggttcaggatgcagtcgcaactttcgacccggatgcgatcgtggagattgtcggtggacagcgtcgtgggaaacctcagggtcacgacgttgatctgcttatcagttctccgggagctgaaaaagagcaagaagaccaactcctgcagaaagtgatgaatctgtggaagaaacaagggttgttgctgtgtggtcgtctggaatggagtcagtgggaatggggggggctgccgtccggtaaggctgatgagggtgacgcggaggcgtcgtgctttctgatcctcaaactttatgatcatctggtgcgtaaaagtaaacgcaatatgccgactggttcgaacatgggcgagtccaaaccgtggaaagcaattaaagtagatctgctgcgttgcccccgcggcagttttgcgtttgcgatgttgcagtggaccggaagccgcatgttccgtcgtgatctgcgctggtacgccctggaagagaagaacatgatgctggacaatcattcgctgtatgacatgactcgtggtatccaactccctgctcgcagtgaagaggaaattttcgaacatctggggcttgaatacctggaaccgttcgaacgtaacgca

SEQ ID NO: 4684 - protein, 528 aa, synthetic construct
  REGION 1..528: note = Variant of terminal deoxynucleotidyltransferase
MHHHHHGGSGSHGIRTIDSDFGKKQQKKGDNHDSSATYEIKFHEFVLFILEEKMGATRRTFLTDLARKKGFRVENELTDEVTHIVAENLSRSEVLAWLKEHKMEKTKQFELLDISWLIESMKVGKPVDTKGKYQLAESVEVSANPDPTEGRVNELPPTMKTVSPYACQRRTTLNNRNQRFTDSLEILRENYELKGNDDTALEFRRAISVLKSLPFEVRSLKDTEGLPWISDEVKGIMEEIIEVGESREVQAVLNDEWYQSFHAFTRVFGVGVKTADKWYRMGLRTLEDVRSSKTLKLTPWQKVGLLYYEDLARGVTRAEADAIWLLVQDAVATFDPDAIVEIVGGQRRGKPQGHDVDLLISSPGAEKEQEDQLLQKVMNLWKKQGLLLCGRLEWSQWEWGGLPSGKADEGDAEASCFLILKLYDHLVRKSKRNMPTGSNMGESKPWKAIKVDLLRCPRGSFAFAMLQWTGSRMFRRDLRWYALEEKNMMLDNHSLYDMTRGIQLPARSEEEIFEHLGLEYLEPFERNA

SEQ ID NO: 4685 - DNA, 1584 bp, synthetic construct
  misc_feature 1..1584: note = Variant of terminal deoxynucleotidyltransferase
  source 1..1584: mol_type = other DNA
atgcaccatcatcatcatggcggtagcggcagccacggcattcgtaccatcgattcggacttcgggaagaaacagcagaaaaaaggcgataaccacgatagttccgccacttatgaaatcaaatttcacgagtttgtgctgttcattctcgaagaaaaaatgggtgcgacgcgtcgtacttttctgacagatttagcccgcaagaaagggttccgcgtcgagaatgaactgaccgacgaagttacccacatcgtggcagaaaatctgtcacgctctgaagtattggcttggctgaaagaacacaagatggagaagaccaagcaattcgaactgctggatattagctggcttatcgaaagcatgaaagttggtaaaccggtggacaccaaggggaaataccagttggcggaatcggttgaggtgagtgcgaacccagatccgacagaaggtcgtgtaaacgagctgcctcctactatgaaaaccgtttctccgtatgcgtgtcaacgccgcaccaccctgaacaaccgtaatcaacgttttacggactcgctggagattcttcgtgaaaattacgagctgaaaggcaacgacgatactgcgctggaatttcgtcgtgctatctccgtgctgaaaagccttccgtttgaggtacgtagcctgaaagacacggaaggattgccctggatcagtgatgaagtcaaagggattatggaagaaatcatcgaagtcggggagtcgcgtgaagtgcaggccgtgctcaatgatgagtggtatcaaagcttccacgcatttacgcgtgtctttggagtgggggtgaagacagcagacaagtggtaccgtatgggtctgcgcaccctcgaggatgttcgttccagcaagaccctgaagttgaccccgtggcagaaagtaggtctgctgtattatgaagatcttgctcgcggcgttacgcgtgccgaagctgacgcgatttggctgctggttcaggatgcagtcgcaactttcgacccggatgcgatcgtggagattgtcggtggacagcgtcgtgggaaacctcagggtcacgacgttgatctgcttatcagttctccgggagctgaaaaagagcaagaagaccaactcctgcagaaagtgatgaatctgtggaagaaacaagggttgttgctgtgtggtcgtctggaatggagtcagtgggaatgggggggttcgccttccggtaaggctgatgagggtgacgcggaggcgtcgtgctttctgatcctcaaactttatgatcatctggtgcgtaaaagtaaacgcaatatgccgactggttcgaacatgggcgagtccaaaccgtggaaagcaattaaagtagatctgctgcgttgcccccgcggcgcttttgcgtttgcgatgttgcagtggaccggaagccgcatgttccgtcgtgatctgcgctggtacgccctggaagagaagaacatgatgctggacaatcattcgctgtatgacatgactcgtggtatccaactccctgctaaatcggaagaggaaattttcgaacatctggggcttgaatacctggaaccgttcgaacgtaacgca

SEQ ID NO: 4686 - protein, 528 aa, synthetic construct
  REGION 1..528: note = Variant of terminal deoxynucleotidyltransferase
MHHHHHGGSGSHGIRTIDSDFGKKQQKKGDNHDSSATYEIKFHEFVLFILEEKMGATRRTFLTDLARKKGFRVENELTDEVTHIVAENLSRSEVLAWLKEHKMEKTKQFELLDISWLIESMKVGKPVDTKGKYQLAESVEVSANPDPTEGRVNELPPTMKTVSPYACQRRTTLNNRNQRFTDSLEILRENYELKGNDDTALEFRRAISVLKSLPFEVRSLKDTEGLPWISDEVKGIMEEIIEVGESREVQAVLNDEWYQSFHAFTRVFGVGVKTADKWYRMGLRTLEDVRSSKTLKLTPWQKVGLLYYEDLARGVTRAEADAIWLLVQDAVATFDPDAIVEIVGGQRRGKPQGHDVDLLISSPGAEKEQEDQLLQKVMNLWKKQGLLLCGRLEWSQWEWGGSPSGKADEGDAEASCFLILKLYDHLVRKSKRNMPTGSNMGESKPWKAIKVDLLRCPRGAFAFAMLQWTGSRMFRRDLRWYALEEKNMMLDNHSLYDMTRGIQLPAKSEEEIFEHLGLEYLEPFERNA

SEQ ID NO: 4687 - DNA, 1584 bp, synthetic construct
  misc_feature 1..1584: note = Variant of terminal deoxynucleotidyltransferase
  source 1..1584: mol_type = other DNA
atgcaccatcatcatcatggcggtagcggcagccacggcattcgtaccatcgattcggacttcgggaagaaacagcagaaaaaaggcgataaccacgatagttccgccacttatgaaatcaaatttcacgagtttgtgctgttcattctcgaagaaaaaatgggtgcgacgcgtcgtacttttctgacagatttagcccgcaagaaagggttccgcgtcgagaatgaactgaccgacgaagttacccacatcgtggcagaaaatctgtcacgctctgaagtattggcttggctgaaagaacacaagatggagaagaccaagcaattcgaactgctggatattagctggcttatcgaaagcatgaaagttggtaaaccggtggacaccaaggggaaataccagttggcggaatcggttgaggtgagtgcgaacccagatccgacagaaggtcgtgtaaacgagctgcctcctactatgaaaaccgtttctccgtatgcgtgtcaacgccgcaccaccctgaacaaccgtaatcaacgttttacggactcgctggagattcttcgtgaaaattacgagctgaaaggcaacgacgatactgcgctggaatttcgtcgtgctatctccgtgctgaaaagccttccgtttgaggtacgtagcctgaaagacacggaaggattgccctggatcagtgatgaagtcaaagggattatggaagaaatcatcgaagtcggggagtcgcgtgaagtgcaggccgtgctcaatgatgagtggtatcaaagcttccacgcatttacgcgtgtctttggagtgggggtgaagacagcagacaagtggtaccgtatgggtctgcgcaccctcgaggatgttcgttccagcaagaccctgaagttgaccccgtggcagaaagtaggtctggcgtattatgaagatcttgctcgcggcgttacgcgtgccgaagctgacgcgatttggctgctggttcaggatgcagtcgcaactttcgacccggatgcgatcgtggagattgtcggtggacagcgtcgtgggaaacctcagggtcacgacgttgatctgcttatcagttctccgggagctgaaaaagagcaagaagaccaactcctgcagaaagtgatgaatctgtggaagaaacaagggttgttgctgtgtggtcgtctggaatggagtcagtgggaatgggggggttcgccttccggtaaggctgatgagggtgacgcggaggcgtcgtgctttctgatcctcaaactttatgatcatctggtgcgtaaaagtaaacgcaatatgccgactggttcgaacatgggcgagtccaaaccgtggaaagcaattaaagtagatctgctgcgttgcccccgcggcagttttgcgtttgcgatgttgcagtggaccggaagccgcatgttccgtcgtgatctgcgctggtacgccctggaagagaagaacatgatgctggacaatcattcgctgtatgacatgactcgtggtatccaactccctgctaaatcggaagaggaaattttcgaacatctggggcttgaatacctggaaccgttcgaacgtaacgca

SEQ ID NO: 4688 - protein, 528 aa, synthetic construct
  REGION 1..528: note = Variant of terminal deoxynucleotidyltransferase
MHHHHHGGSGSHGIRTIDSDFGKKQQKKGDNHDSSATYEIKFHEFVLFILEEKMGATRRTFLTDLARKKGFRVENELTDEVTHIVAENLSRSEVLAWLKEHKMEKTKQFELLDISWLIESMKVGKPVDTKGKYQLAESVEVSANPDPTEGRVNELPPTMKTVSPYACQRRTTLNNRNQRFTDSLEILRENYELKGNDDTALEFRRAISVLKSLPFEVRSLKDTEGLPWISDEVKGIMEEIIEVGESREVQAVLNDEWYQSFHAFTRVFGVGVKTADKWYRMGLRTLEDVRSSKTLKLTPWQKVGLAYYEDLARGVTRAEADAIWLLVQDAVATFDPDAIVEIVGGQRRGKPQGHDVDLLISSPGAEKEQEDQLLQKVMNLWKKQGLLLCGRLEWSQWEWGGSPSGKADEGDAEASCFLILKLYDHLVRKSKRNMPTGSNMGESKPWKAIKVDLLRCPRGSFAFAMLQWTGSRMFRRDLRWYALEEKNMMLDNHSLYDMTRGIQLPAKSEEEIFEHLGLEYLEPFERNA

SEQ ID NO: 4689 - DNA, 1584 bp, synthetic construct
  misc_feature 1..1584: note = Variant of terminal deoxynucleotidyltransferase
  source 1..1584: mol_type = other DNA
atgcaccatcatcatcatggcggtagcggcagccacggcattcgtaccatcgattcggacttcgggaagaaacagcagaaaaaaggcgataaccacgatagttccgccacttatgaaatcaaatttcacgagtttgtgctgttcattctcgaagaaaaaatgggtgcgacgcgtcgtacttttctgacagatttagcccgcaagaaagggttccgcgtcgagaatgaactgaccgacgaagttacccacatcgtggcagaaaatctgtcacgctctgaagtattggcttggctgaaagaacacaagatggagaagaccaagcaattcgaactgctggatattagctggcttatcgaaagcatgaaagttggtaaaccggtggacaccaaggggaaataccagttggcggaatcggttgaggtgagtgcgaacccagatccgacagaaggtcgtgtaaacgagctgcctcctactatgaaaaccgtttctccgtatgcgtgtcaacgccgcaccaccctgaacaaccgtaatcaacgttttacggactcgctggagattcttcgtgaaaattacgagctgaaaggcaacgacgatactgcgctggaatttcgtcgtgctatctccgtgctgaaaagccttccgtttgaggtacgtagcctgaaagacacggaaggattgccctggatcagtgatgaagtcaaagggattatggaagaaatcatcgaagtcggggagtcgcgtgaagtgcaggccgtgctcaatgatgagtggtatcaaagcttccacgcatttacgcgtgtctttggagtgggggtgaagacagcagacaagtggtaccgtatgggtctgcgcaccctcgaggatgttcgttccagcaagaccctgaagttgaccccgtggcagaaagtaggtctgctgtatcaagaagatcttgctcgcggcgttacgcgtgccgaagctgacgcgatttggctgctggttcaggatgcagtcgcaactttcgacccggatgcgatcgtggagattgtcggtggacagcgtcgtgggaaacctcagggtcacgacgttgatctgcttatcagttctccgggagctgaaaaagagcaagaagaccaactcctgcagaaagtgatgaatctgtggaagaaacaagggttgttgctgtgtggtcgtctggaatggagtcagtgggaatgggggggttcgccttccggtaaggctgatgagggtgacgcggaggcgtcgtgctttctgatcctcaaactttatgatcatctggtgcgtaaaagtaaacgcaatatgccgactggttcgaacatgggcgagtccaaaccgtggaaagcaattaaagtagatctgctgcgttgcccccgcggcagttttgcgtttgcgatgttgcagtggaccggaagccgcatgttccgtcgtgatctgcgctggtacgccctggaagagaagaacatgatgctggacaatcattcgctgtatgacatgactcgtggtatccaactccctgctaaatcggaagaggaaattttcgaacatctggggcttgaatacctggaaccgttcgaacgtaacgca

SEQ ID NO: 4690 - protein, 528 aa, synthetic construct
  REGION 1..528: note = Variant of terminal deoxynucleotidyltransferase
MHHHHHGGSGSHGIRTIDSDFGKKQQKKGDNHDSSATYEIKFHEFVLFILEEKMGATRRTFLTDLARKKGFRVENELTDEVTHIVAENLSRSEVLAWLKEHKMEKTKQFELLDISWLIESMKVGKPVDTKGKYQLAESVEVSANPDPTEGRVNELPPTMKTVSPYACQRRTTLNNRNQRFTDSLEILRENYELKGNDDTALEFRRAISVLKSLPFEVRSLKDTEGLPWISDEVKGIMEEIIEVGESREVQAVLNDEWYQSFHAFTRVFGVGVKTADKWYRMGLRTLEDVRSSKTLKLTPWQKVGLLYQEDLARGVTRAEADAIWLLVQDAVATFDPDAIVEIVGGQRRGKPQGHDVDLLISSPGAEKEQEDQLLQKVMNLWKKQGLLLCGRLEWSQWEWGGSPSGKADEGDAEASCFLILKLYDHLVRKSKRNMPTGSNMGESKPWKAIKVDLLRCPRGSFAFAMLQWTGSRMFRRDLRWYALEEKNMMLDNHSLYDMTRGIQLPAKSEEEIFEHLGLEYLEPFERNA

SEQ ID NO: 4691 - DNA, 1584 bp, synthetic construct
  misc_feature 1..1584: note = Variant of terminal deoxynucleotidyltransferase
  source 1..1584: mol_type = other DNA
atgcaccatcatcatcatggcggtagcggcagccacggcattcgtaccatcgattcggacttcgggaagaaacagcagaaaaaaggcgataaccacgatagttccgccacttatgaaatcaaatttcacgagtttgtgttgttcattctcgaagaaaaaatgggtgcgacgcgtcgtacttttctgacagatttagcccgcaagaaagggttccgcgtcgagaatgaactgaccgacgaagttacccacatcgtggcagaaaatctgtcacgctctgaagtattggcttggctgaaagaacacaagatggagaagaccaagcaattcgaactgctggatattagctggcttatcgaaagcatgaaagttggtaaaccggtggacaccaaggggaaataccagttggcggaatcggttgaggtgagtgcgaacccagatccgacagaaggtcgtgtaaacgagctgcctcctactatgaaaaccgtttctccgtatgcgtgtcaacgccgcaccaccctgaacaaccgtaatcaacgttttacggactcgctggagattcttcgtgaaaattacgagctgaaaggcaacgacgatactgcgctggaatttcgtcgtgctatctccgtgctgaaaagccttccgtttgaggtacgtagcctgaaagacacggaaggattgccctggatcagtgatgaagtcaaagggattatggaagaaatcatcgaagtcggggagtcgcgtgaagtgcaggccgtgctcaatgatgagtggtatcaaagcttccacgcatttacgcgtgtctttggagtgggggtgaagacagcagacaagtggtaccgtatgggtctgcgcaccctcgaggatgttcgttccagcaagaccctgaagttgaccccgtggcagaaagtaggtctgctgtattatgaagatcttgctcgcggcgttacgcgtccggaagctgacgcgatttggctgctggttcaggatgcagtcgcaactttcgacccggatgcgatcgtggagattgtcggtggacagcgtcgtgggaaacctcagggtcacgacgttgatctgcttatcagttctccgggagctgaaaaagagcaagaagaccaactcctgcagaaagtgatgaatctgtggaagaaacaagggttgttgctgtgtggtcgtctggaatggagtcagtgggaatgggggggttcgccttccggtaaggctgatgagggtgacgcggaggcgtcgtgctttctgatcctcaaactttatgatcatctggtgcgtaaaagtaaacgcaatatgccgactggttcgaacatgggcgagtccaaaccgtggaaagcaattaaagtagatctgctgcgttgcccccgcggcagttttgcgtttgcgatgttgcagtggaccggaagccgcatgttccgtcgtgatctgcgctggtacgccctggaagagaagaacatgatgctggacaatcattcgctgtatgacatgactcgtggtatccaactccctgctaaatcggaagaggaaattttcgaacatctggggcttgaatacctggaaccgttcgaacgtaacgca

SEQ ID NO: 4692 - protein, 528 aa, synthetic construct
  REGION 1..528: note = Variant of terminal deoxynucleotidyltransferase
MHHHHHGGSGSHGIRTIDSDFGKKQQKKGDNHDSSATYEIKFHEFVLFILEEKMGATRRTFLTDLARKKGFRVENELTDEVTHIVAENLSRSEVLAWLKEHKMEKTKQFELLDISWLIESMKVGKPVDTKGKYQLAESVEVSANPDPTEGRVNELPPTMKTVSPYACQRRTTLNNRNQRFTDSLEILRENYELKGNDDTALEFRRAISVLKSLPFEVRSLKDTEGLPWISDEVKGIMEEIIEVGESREVQAVLNDEWYQSFHAFTRVFGVGVKTADKWYRMGLRTLEDVRSSKTLKLTPWQKVGLLYYEDLARGVTRPEADAIWLLVQDAVATFDPDAIVEIVGGQRRGKPQGHDVDLLISSPGAEKEQEDQLLQKVMNLWKKQGLLLCGRLEWSQWEWGGSPSGKADEGDAEASCFLILKLYDHLVRKSKRNMPTGSNMGESKPWKAIKVDLLRCPRGSFAFAMLQWTGSRMFRRDLRWYALEEKNMMLDNHSLYDMTRGIQLPAKSEEEIFEHLGLEYLEPFERNA

SEQ ID NO: 4693 - DNA, 1584 bp, synthetic construct
  misc_feature 1..1584: note = Variant of terminal deoxynucleotidyltransferase
  source 1..1584: mol_type = other DNA
atgcaccatcatcatcatggcggtagcggcagccacggcattcgtaccatcgattcggacttcgggaagaaacagcagaaaaaaggcgataaccacgatagttccgccacttatgaaatcaaatttcacgagtttgtgctgttcattctcgaagaaaaaatgggtgcgacgcgtcgtacttttctgacagatttagcccgcaagaaagggttccgcgtcgagaatgaactgaccgacgaagttacccacatcgtggcagaaaatctgtcacgctctgaagtattggcttggctgaaagaacacaagatggagaagaccaagcaattcgaactgctggatattagctggcttatcgaaagcatgaaagttggtaaaccggtggacaccaaggggaaataccagttggcggaatcggttgaggtgagtgcgaacccagatccgacagaaggtcgtgtaaacgagctgcctcctactatgaaaaccgtttctccgtatgcgtgtcaacgccgcaccaccctgaacaaccgtaatcaacgttttacggactcgctggagattcttcgtgaaaattacgagctgaaaggcaacgacgatactgcgctggaatttcgtcgtgctatctccgtgctgaaaagccttccgtttgaggtacgtagcctgaaagacacggaaggattgccctggatcagtgatgaagtcaaagggattatggaagaaatcatcgaagtcggggagtcgcgtgaagtgcaggccgtgctcaatgatgagtggtatcaaagcttccacgcatttacgcgtgtctttggagtgggggtgaagacagcagacaagtggtaccgtatgggtctgcgcaccctcgaggatgttcgttccagcaagaccctgaagttgaccccgtggcagaaagtaggtctgctgtattatgaagatcttgctcgcggcgttacgcgtgccgaagctgacgcgatttggctgctggctcaggatgcagtcgcaactttcgacccggatgcgatcgtggagattgtcggtggacagcgtcgtgggaaacctcagggtcacgacgttgatctgcttatcagttctccgggagctgaaaaagagcaagaagaccaactcctgcagaaagtgatgaatctgtggaagaaacaagggttgttgctgtgtggtcgtctggaatggagtcagtgggaatgggggggttcgccttccggtaaggctgatgagggtgacgcggaggcgtcgtgctttctgatcctcaaactttatgatcatctggtgcgtaaaagtaaacgcaatatgccgactggttcgaacatgggcgagtccaaaccgtggaaagcaattaaagtagatctgctgcgttgcccccgcggcagttttgcgtttgcgatgttgcagtggaccggaagccgcatgttccgtcgtgatctgcgctggtacgccctggaagagaagaacatgatgctggacaatcattcgctgtatgacatgactcgtggtatccaactccctgctaaatcggaagaggaaattttcgaacatctggggcttgaatacctggaaccgttcgaacgtaacgca

SEQ ID NO: 4694 - protein, 528 aa, synthetic construct
  REGION 1..528: note = Variant of terminal deoxynucleotidyltransferase
MHHHHHGGSGSHGIRTIDSDFGKKQQKKGDNHDSSATYEIKFHEFVLFILEEKMGATRRTFLTDLARKKGFRVENELTDEVTHIVAENLSRSEVLAWLKEHKMEKTKQFELLDISWLIESMKVGKPVDTKGKYQLAESVEVSANPDPTEGRVNELPPTMKTVSPYACQRRTTLNNRNQRFTDSLEILRENYELKGNDDTALEFRRAISVLKSLPFEVRSLKDTEGLPWISDEVKGIMEEIIEVGESREVQAVLNDEWYQSFHAFTRVFGVGVKTADKWYRMGLRTLEDVRSSKTLKLTPWQKVGLLYYEDLARGVTRAEADAIWLLAQDAVATFDPDAIVEIVGGQRRGKPQGHDVDLLISSPGAEKEQEDQLLQKVMNLWKKQGLLLCGRLEWSQWEWGGSPSGKADEGDAEASCFLILKLYDHLVRKSKRNMPTGSNMGESKPWKAIKVDLLRCPRGSFAFAMLQWTGSRMFRRDLRWYALEEKNMMLDNHSLYDMTRGIQLPAKSEEEIFEHLGLEYLEPFERNA

SEQ ID NO: 4695 - DNA, 1584 bp, synthetic construct
  misc_feature 1..1584: note = Variant of terminal deoxynucleotidyltransferase
  source 1..1584: mol_type = other DNA
atgcaccatcatcatcatggcggtagcggcagccacggcattcgtaccatcgattcggacttcgggaagaaacagcagaaaaaaggcgataaccacgatagttccgccacttatgaaatcaaatttcacgagtttgtgctgttcattctcgaagaaaaaatgggtgcgacgcgtcgtacttttctgacagatttagcccgcaagaaagggttccgcgtcgagaatgaactgaccgacgaagttacccacatcgtggcagaaaatctgtcacgctctgaagtattggcttggctgaaagaacacaagatggagaagaccaagcaattcgaactgctggatattagctggcttatcgaaagcatgaaagttggtaaaccggtggacaccaaggggaaataccagttggcggaatcggttgaggtgagtgcgaacccagatccgacagaaggtcgtgtaaacgagctgcctcctactatgaaaaccgtttctccgtatgcgtgtcaacgccgcaccaccctgaacaaccgtaatcaacgttttacggactcgctggagattcttcgtgaaaattacgagctgaaaggcaacgacgatactgcgctggaatttcgtcgtgctatctccgtgctgaaaagccttccgtttgaggtacgtagcctgaaagacacggaaggattgccctggatcagtgatgaagtcaaagggattatggaagaaatcatcgaagtcggggagtcgcgtgaagtgcaggccgtgctcaatgatgagtggtatcaaagcttccacgcatttacgcgtgtctttggagtgggggtgaagacagcagacaagtggtaccgtatgggtctgcgcaccctcgaggatgttcgttccagcaagaccctgaagttgaccccgtggcagaaagtaggtctgctgtattatgaagatcttgctcgcggcgttacgcgtcgggaagctgacgcgatttggctgctggttcaggatgcagtcgcaactttcgacccggatgcgatcgtggagattgtcggtggacagcgtcgtgggaaacctcagggtcacgacgttgatctgcttatcagttctccgggagctgaaaaagagcaagaagaccaactcctgcagaaagtgatgaatctgtggaagaaacaagggttgttgctgtgtggtcgtctggaatggagtcagtgggaatgggggggttcgccttccggtaaggctgatgagggtgacgcggaggcgtcgtgctttctgatcctcaaactttatgatcatctggtgcgtaaaagtaaacgcaatatgccgactggttcgaacatgggcgagtccaaaccgtggaaagcaattaaagtagatctgctgcgttgcccccgcggcagttttgcgtttgcgatgttgcagtggaccggaagccgcatgttccgtcgtgatctgcgctggtacgccctggaagagaagaacatgatgctggacaatcattcgctgtatgacatgactcgtggtatccaactccctgctaaatcggaagaggaaattttcgaacatctggggcttgaatacctggaaccgttcgaacgtaacgca

SEQ ID NO: 4696 - protein, 528 aa, synthetic construct
  REGION 1..528: note = Variant of terminal deoxynucleotidyltransferase
MHHHHHGGSGSHGIRTIDSDFGKKQQKKGDNHDSSATYEIKFHEFVLFILEEKMGATRRTFLTDLARKKGFRVENELTDEVTHIVAENLSRSEVLAWLKEHKMEKTKQFELLDISWLIESMKVGKPVDTKGKYQLAESVEVSANPDPTEGRVNELPPTMKTVSPYACQRRTTLNNRNQRFTDSLEILRENYELKGNDDTALEFRRAISVLKSLPFEVRSLKDTEGLPWISDEVKGIMEEIIEVGESREVQAVLNDEWYQSFHAFTRVFGVGVKTADKWYRMGLRTLEDVRSSKTLKLTPWQKVGLLYYEDLARGVTRREADAIWLLVQDAVATFDPDAIVEIVGGQRRGKPQGHDVDLLISSPGAEKEQEDQLLQKVMNLWKKQGLLLCGRLEWSQWEWGGSPSGKADEGDAEASCFLILKLYDHLVRKSKRNMPTGSNMGESKPWKAIKVDLLRCPRGSFAFAMLQWTGSRMFRRDLRWYALEEKNMMLDNHSLYDMTRGIQLPAKSEEEIFEHLGLEYLEPFERNA

SEQ ID NO: 4697 - DNA, 1584 bp, synthetic construct
  misc_feature 1..1584: note = Variant of terminal deoxynucleotidyltransferase
  source 1..1584: mol_type = other DNA
atgcaccatcatcatcatggcggtagcggcagccacggcattcgtaccatcgattcggacttcgggaagaaacagcagaaaaaaggcgataaccacgatagttccgccacttatgaaatcaaatttcacgagtttgtgctgttcattctcgaagaaaaaatgggtgcgacgcgtcgtacttttctgacagatttagcccgcaagaaagggttccgcgtcgagaatgaactgaccgacgaagttacccacatcgtggcagaaaatctgtcacgctctgaagtattggcttggctgaaagaacacaagatggagaagaccaagcaattcgaactgctggatattagctggcttatcgaaagcatgaaagttggtaaaccggtggacaccaaggggaaataccagttggcggaatcggttgaggtgagtgcgaacccagatccgacagaaggtcgtgtaaacgagctgcctcctactatgaaaaccgtttctccgtatgcgtgtcaacgccgcaccaccctgaacaaccgtaatcaacgttttacggactcgctggagattcttcgtgaaaattacgagctgaaaggcaacgacgatactgcgctggaatttcgtcgtgctatctccgtgctgaaaagccttccgtttgaggtacgtagcctgaaagacacggaaggattgccctggatcagtgatgaagtcaaagggattatggaagaaatcatcgaagtcggggagtcgcgtgaagtgcaggccgtgctcaatgatgagaagtatcaaagcttccacgcatttacgcgtgtctttggagtgggggtgaagacagcagacaagtggtaccgtatgggtctgcgcaccctcgaggatgttcgttccagcaagaccctgaagttgaccccgtggcagaaagtaggtctgctgtattatgaagatcttgctcgcggcgttacgcgtgccgaagctgacgcgatttggctgctggttcaggatgcagtcgcaactttcgacccggatgcgatcgtggagattgtcggtggacagcgtcgtgggaaacctcagggtcacgacgttgatctgcttatcagttctccgggagctgaaaaagagcaagaagaccaactcctgcagaaagtgatgaatctgtggaagaaacaagggttgttgctgtgtggtcgtctggaatggagtcagtgggaatgggggggttcgccttccggtaaggctgatgagggtgacgcggaggcgtcgtgctttctgatcctcaaactttatgatcatctggtgcgtaaaagtaaacgcaatatgccgactggttcgaacatgggcgagtccaaaccgtggaaagcaattaaagtagatctgctgcgttgcccccgcggcagttttgcgtttgcgatgttgcagtggaccggaagccgcatgttccgtcgtgatctgcgctggtacgccctggaagagaagaacatgatgctggacaatcattcgctgtatgacatgactcgtggtatccaactccctgctaaatcggaagaggaaattttcgaacatctggggcttgaatacctggaaccgttcgaacgtaacgca

SEQ ID NO: 4698 - protein, 528 aa, synthetic construct
  REGION 1..528: note = Variant of terminal deoxynucleotidyltransferase
MHHHHHGGSGSHGIRTIDSDFGKKQQKKGDNHDSSATYEIKFHEFVLFILEEKMGATRRTFLTDLARKKGFRVENELTDEVTHIVAENLSRSEVLAWLKEHKMEKTKQFELLDISWLIESMKVGKPVDTKGKYQLAESVEVSANPDPTEGRVNELPPTMKTVSPYACQRRTTLNNRNQRFTDSLEILRENYELKGNDDTALEFRRAISVLKSLPFEVRSLKDTEGLPWISDEVKGIMEEIIEVGESREVQAVLNDEKYQSFHAFTRVFGVGVKTADKWYRMGLRTLEDVRSSKTLKLTPWQKVGLLYYEDLARGVTRAEADAIWLLVQDAVATFDPDAIVEIVGGQRRGKPQGHDVDLLISSPGAEKEQEDQLLQKVMNLWKKQGLLLCGRLEWSQWEWGGSPSGKADEGDAEASCFLILKLYDHLVRKSKRNMPTGSNMGESKPWKAIKVDLLRCPRGSFAFAMLQWTGSRMFRRDLRWYALEEKNMMLDNHSLYDMTRGIQLPAKSEEEIFEHLGLEYLEPFERNA

SEQ ID NO: 4699 - DNA, 1584 bp, synthetic construct
  misc_feature 1..1584: note = Variant of terminal deoxynucleotidyltransferase
  source 1..1584: mol_type = other DNA
atgcaccatcatcatcatggcggtagcggcagccacggcattcgtaccatcgattcggacttcgggaagaaacagcagaaaaaaggcgataaccacgatagttccgccacttatgaaatcaaatttcacgagtttgtgctgttcattctcgaagaaaaaatgggtgcgacgcgtcgtacttttctgacagatttagcccgcaagaaagggttccgcgtcgagaatgaactgaccgacgaagttacccacatcgtggcagaaaatctgtcacgctctgaagtattggcttggctgaaagaacacaagatggagaagaccaagcaattcgaactgctggatattagctggcttatcgaaagcatgaaagttggtaaaccggtggacaccaaggggaaataccagttggcggaatcggttgaggtgagtgcgaacccagatccgacagaaggtcgtgtaaacgagctgcctcctactatgaaaaccgtttctccgtatgcgtgtcaacgccgcaccaccctgaacaaccgtaatcaacgttttacggactcgctggagattcttcgtgaaaattacgagctgaaaggcaacgacgatactgcgctggaatttcgtcgtgctatctccgtgctgaaaagccttccgtttgaggtacgtagcctgaaagacacggaaggattgccctggatcagtgatgaagtcaaagggattatggaagaaatcatcgaagtcggggagtcgcgtgaagtgcaggccgtgctcaatgatgagtggtatcaaagcttccacgcatttacgcgtgtctttggagtgggggtgaagacagcagacaagtggtaccgtatgggtctgcgcaccctcgaggatgttcgttccagcaagaccctgaagttgaccccgtggcagaaagtaggtctgctgaattatgaagatcttgctcgcggcgttacgcgtgccgaagctgacgcgatttggctgctggttcaggatgcagtcgcaactttcgacccggatgcgatcgtggagattgtcggtggacagcgtcgtgggaaacctcagggtcacgacgttgatctgcttatcagttctccgggagctgaaaaagagcaagaagaccaactcctgcagaaagtgatgaatctgtggaagaaacaagggttgttgctgtgtggtcgtctggaatggagtcagtgggaatgggggggttcgccttccggtaaggctgatgagggtgacgcggaggcgtcgtgctttctgatcctcaaactttatgatcatctggtgcgtaaaagtaaacgcaatatgccgactggttcgaacatgggcgagtccaaaccgtggaaagcaattaaagtagatctgctgcgttgcccccgcggcagttttgcgtttgcgatgttgcagtggaccggaagccgcatgttccgtcgtgatctgcgctggtacgccctggaagagaagaacatgatgctggacaatcattcgctgtatgacatgactcgtggtatccaactccctgctaaatcggaagaggaaattttcgaacatctggggcttgaatacctggaaccgttcgaacgtaacgca

SEQ ID NO: 4700 - protein, 528 aa, synthetic construct
  REGION 1..528: note = Variant of terminal deoxynucleotidyltransferase
MHHHHHGGSGSHGIRTIDSDFGKKQQKKGDNHDSSATYEIKFHEFVLFILEEKMGATRRTFLTDLARKKGFRVENELTDEVTHIVAENLSRSEVLAWLKEHKMEKTKQFELLDISWLIESMKVGKPVDTKGKYQLAESVEVSANPDPTEGRVNELPPTMKTVSPYACQRRTTLNNRNQRFTDSLEILRENYELKGNDDTALEFRRAISVLKSLPFEVRSLKDTEGLPWISDEVKGIMEEIIEVGESREVQAVLNDEWYQSFHAFTRVFGVGVKTADKWYRMGLRTLEDVRSSKTLKLTPWQKVGLLNYEDLARGVTRAEADAIWLLVQDAVATFDPDAIVEIVGGQRRGKPQGHDVDLLISSPGAEKEQEDQLLQKVMNLWKKQGLLLCGRLEWSQWEWGGSPSGKADEGDAEASCFLILKLYDHLVRKSKRNMPTGSNMGESKPWKAIKVDLLRCPRGSFAFAMLQWTGSRMFRRDLRWYALEEKNMMLDNHSLYDMTRGIQLPAKSEEEIFEHLGLEYLEPFERNA

SEQ ID NO: 4701 - DNA, 1584 bp, synthetic construct
  misc_feature 1..1584: note = Variant of terminal deoxynucleotidyltransferase
  source 1..1584: mol_type = other DNA
atgcaccatcatcatcatggcggtagcggcagccacggcattcgtaccatcgattcggacttcgggaagaaacagcagaaaaaaggcgataaccacgatagttccgccacttatgaaatcaaatttcacgagtttgtgctgttcattctcgaagaaaaaatgggtgcgacgcgtcgtacttttctgacagatttagcccgcaagaaagggttccgcgtcgagaatgaactgaccgacgaagttacccacatcgtggcagaaaatctgtcacgctctgaagtattggcttggctgaaagaacacaagatggagaagaccaagcaattcgaactgctggatattagctggcttatcgaaagcatgaaagttggtaaaccggtggacaccaaggggaaataccagttggcggaatcggttgaggtgagtgcgaacccagatccgacagaaggtcgtgtaaacgagctgcctcctactatgaaaaccgtttctccgtatgcgtgtcaacgccgcaccaccctgaacaaccgtaatcaacgttttacggactcgctggagattcttcgtgaaaattacgagctgaaaggcaacgacgatactgcgctggaatttcgtcgtgctatctccgtgctgaaaagccttccgtttgaggtacgtagcctgaaagacacggaaggattgccctggatcagtgatgaagtcaaagggattatggaagaaatcatcgaagtcggggagtcgcgtgaagtgcaggccgtgctcaatgatgagtggtatcaaagcttccacgcatttacgcgtgtctttggagtgggggtgaagacagcagacaagtggtaccgtatgggtctgcgcaccctcgaggatgttcgttccagcaagaccctgaagttgaccccgtggcagaaagtaggttttctgtattatgaagatcttgctcgcggcgttacgcgtgccgaagctgacgcgatttggctgctggttcaggatgcagtcgcaactttcgacccggatgcgatcgtggagattgtcggtggacagcgtcgtgggaaacctcagggtcacgacgttgatctgcttatcagttctccgggagctgaaaaagagcaagaagaccaactcctgcagaaagtgatgaatctgtggaagaaacaagggttgttgctgtgtggtcgtctggaatggagtcagtgggaatgggggggttcgccttccggtaaggctgatgagggtgacgcggaggcgtcgtgctttctgatcctcaaactttatgatcatctggtgcgtaaaagtaaacgcaatatgccgactggttcgaacatgggcgagtccaaaccgtggaaagcaattaaagtagatctgctgcgttgcccccgcggcagttttgcgtttgcgatgttgcagtggaccggaagccgcatgttccgtcgtgatctgcgctggtacgccctggaagagaagaacatgatgctggacaatcattcgctgtatgacatgactcgtggtatccaactccctgctaaatcggaagaggaaattttcgaacatctggggcttgaatacctggaaccgttcgaacgtaacgca

SEQ ID NO: 4702 - protein, 528 aa, synthetic construct
  REGION 1..528: note = Variant of terminal deoxynucleotidyltransferase
MHHHHHGGSGSHGIRTIDSDFGKKQQKKGDNHDSSATYEIKFHEFVLFILEEKMGATRRTFLTDLARKKGFRVENELTDEVTHIVAENLSRSEVLAWLKEHKMEKTKQFELLDISWLIESMKVGKPVDTKGKYQLAESVEVSANPDPTEGRVNELPPTMKTVSPYACQRRTTLNNRNQRFTDSLEILRENYELKGNDDTALEFRRAISVLKSLPFEVRSLKDTEGLPWISDEVKGIMEEIIEVGESREVQAVLNDEWYQSFHAFTRVFGVGVKTADKWYRMGLRTLEDVRSSKTLKLTPWQKVGFLYYEDLARGVTRAEADAIWLLVQDAVATFDPDAIVEIVGGQRRGKPQGHDVDLLISSPGAEKEQEDQLLQKVMNLWKKQGLLLCGRLEWSQWEWGGSPSGKADEGDAEASCFLILKLYDHLVRKSKRNMPTGSNMGESKPWKAIKVDLLRCPRGSFAFAMLQWTGSRMFRRDLRWYALEEKNMMLDNHSLYDMTRGIQLPAKSEEEIFEHLGLEYLEPFERNA

SEQ ID NO: 4703 - DNA, 1584 bp, synthetic construct
  misc_feature 1..1584: note = Variant of terminal deoxynucleotidyltransferase
  source 1..1584: mol_type = other DNA
atgcaccatcatcatcatggcggtagcggcagccacggcattcgtaccatcgattcggacttcgggaagaaacagcagaaaaaaggcgataaccacgatagttccgccacttatgaaatcaaatttcacgagtttgtgctgttcattctcgaagaaaaaatgggtgcgacgcgtcgtacttttctgacagatttagcccgcaagaaagggttccgcgtcgagaatgaactgaccgacgaagttacccacatcgtggcagaaaatctgtcacgctctgaagtattggcttggctgaaagaacacaagatggagaagaccaagcaattcgaactgctggatattagctggcttatcgaaagcatgaaagttggtaaaccggtggacaccaaggggaaataccagttggcggaatcggttgaggtgagtgcgaacccagatccgacagaaggtcgtgtaaacgagctgcctcctactatgaaaaccgtttctccgtatgcgtgtcaacgccgcaccaccctgaacaaccgtaatcaacgttttacggactcgctggagattcttcgtgaaaattacgagctgaaaggcaacgacgatactgcgctggaatttcgtcgtgctatctccgtgctgaaaagccttccgtttgaggtacgtagcctgaaagacacggaaggattgccctggatcagtgatgaagtcaaagggattatggaagaaatcatcgaagtcggggagtcgcgtgaagtgcaggccgtgctcaatgatgagtggtatcgtagcttccacgcatttacgcgtgtctttggagtgggggtgaagacagcagacaagtggtaccgtatgggtctgcgcaccctcgaggatgttcgttccagcaagaccctgaagttgaccccgtggcagaaagtaggtctgctgtattatgaagatcttgctcgcggcgttacgcgtgccgaagctgacgcgatttggctgctggttcaggatgcagtcgcaactttcgacccggatgcgatcgtggagattgtcggtggacagcgtcgtgggaaacctcagggtcacgacgttgatctgcttatcagttctccgggagctgaaaaagagcaagaagaccaactcctgcagaaagtgatgaatctgtggaagaaacaagggttgttgctgtgtggtcgtctggaatggagtcagtgggaatgggggggttcgccttccggtaaggctgatgagggtgacgcggaggcgtcgtgctttctgatcctcaaactttatgatcatctggtgcgtaaaagtaaacgcaatatgccgactggttcgaacatgggcgagtccaaaccgtggaaagcaattaaagtagatctgctgcgttgcccccgcggcagttttgcgtttgcgatgttgcagtggaccggaagccgcatgttccgtcgtgatctgcgctggtacgccctggaagagaagaacatgatgctggacaatcattcgctgtatgacatgactcgtggtatccaactccctgctaaatcggaagaggaaattttcgaacatctggggcttgaatacctggaaccgttcgaacgtaacgca

SEQ ID NO: 4704 - protein, 528 aa, synthetic construct
  REGION 1..528: note = Variant of terminal deoxynucleotidyltransferase
MHHHHHGGSGSHGIRTIDSDFGKKQQKKGDNHDSSATYEIKFHEFVLFILEEKMGATRRTFLTDLARKKGFRVENELTDEVTHIVAENLSRSEVLAWLKEHKMEKTKQFELLDISWLIESMKVGKPVDTKGKYQLAESVEVSANPDPTEGRVNELPPTMKTVSPYACQRRTTLNNRNQRFTDSLEILRENYELKGNDDTALEFRRAISVLKSLPFEVRSLKDTEGLPWISDEVKGIMEEIIEVGESREVQAVLNDEWYRSFHAFTRVFGVGVKTADKWYRMGLRTLEDVRSSKTLKLTPWQKVGLLYYEDLARGVTRAEADAIWLLVQDAVATFDPDAIVEIVGGQRRGKPQGHDVDLLISSPGAEKEQEDQLLQKVMNLWKKQGLLLCGRLEWSQWEWGGSPSGKADEGDAEASCFLILKLYDHLVRKSKRNMPTGSNMGESKPWKAIKVDLLRCPRGSFAFAMLQWTGSRMFRRDLRWYALEEKNMMLDNHSLYDMTRGIQLPAKSEEEIFEHLGLEYLEPFERNA

SEQ ID NO: 4705 - DNA, 1584 bp, synthetic construct
  misc_feature 1..1584: note = Variant of terminal deoxynucleotidyltransferase
  source 1..1584: mol_type = other DNA
atgcaccatcatcatcatggcggtagcggcagccacggcattcgtaccatcgattcggacttcgggaagaaacagcagaaaaaaggcgataaccacgatagttccgccacttatgaaatcaaatttcacgagtttgtgctgttcattctcgaagaaaaaatgggtgcgacgcgtcgtacttttctgacagatttagcccgcaagaaagggttccgcgtcgagaatgaactgaccgacgaagttacccacatcgtggcagaaaatctgtcacgctctgaagtattggcttggctgaaagaacacaagatggagaagaccaagcaattcgaactgctggatattagctggcttatcgaaagcatgaaagttggtaaaccggtggacaccaaggggaaataccagttggcggaatcggttgaggtgagtgcgaacccagatccgacagaaggtcgtgtaaacgagctgcctcctactatgaaaaccgtttctccgtatgcgtgtcaacgccgcaccaccctgaacaaccgtaatcaacgttttacggcttcgctggagattcttcgtgaaaattacgagctgaaaggcaacgacgatactgcgctggaatttcgtcgtgctatctccgtgctgaaaagccttccgtttgaggtacgtagcctgaaagacacggaaggattgccctggatcagtgatgaagtcaaagggattatggaagaaatcatcgaagtcggggagtcgcgtgaagtgcaggccgtgctcaatgatgagtggtatcaaagcttccacgcatttacgcgtgtctttggagtgggggtgaagacagcagacaagtggtaccgtatgggtctgcgcaccctcgaggatgttcgttccagcaagaccctgaagttgaccccgtggcagaaagtaggtctgctgtattatgaagatcttgctcgcggcgttacgcgtgccgaagctgacgcgatttggctgctggttcaggatgcagtcgcaactttcgacccggatgcgatcgtggagattgtcggtggacagcgtcgtgggaaacctcagggtcacgacgttgatctgcttatcagttctccgggagctgaaaaagagcaagaagaccaactcctgcagaaagtgatgaatctgtggaagaaacaagggttgttgctgtgtggtcgtctggaatggagtcagtgggaatgggggggttcgccttccggtaaggctgatgagggtgacgcggaggcgtcgtgctttctgatcctcaaactttatgatcatctggtgcgtaaaagtaaacgcaatatgccgactggttcgaacatgggcgagtccaaaccgtggaaagcaattaaagtagatctgctgcgttgcccccgcggcagttttgcgtttgcgatgttgcagtggaccggaagccgcatgttccgtcgtgatctgcgctggtacgccctggaagagaagaacatgatgctggacaatcattcgctgtatgacatgactcgtggtatccaactccctgctaaatcggaagaggaaattttcgaacatctggggcttgaatacctggaaccgttcgaacgtaacgca

SEQ ID NO: 4706 - protein, 528 aa, synthetic construct
  REGION 1..528: note = Variant of terminal deoxynucleotidyltransferase
MHHHHHGGSGSHGIRTIDSDFGKKQQKKGDNHDSSATYEIKFHEFVLFILEEKMGATRRTFLTDLARKKGFRVENELTDEVTHIVAENLSRSEVLAWLKEHKMEKTKQFELLDISWLIESMKVGKPVDTKGKYQLAESVEVSANPDPTEGRVNELPPTMKTVSPYACQRRTTLNNRNQRFTASLEILRENYELKGNDDTALEFRRAISVLKSLPFEVRSLKDTEGLPWISDEVKGIMEEIIEVGESREVQAVLNDEWYQSFHAFTRVFGVGVKTADKWYRMGLRTLEDVRSSKTLKLTPWQKVGLLYYEDLARGVTRAEADAIWLLVQDAVATFDPDAIVEIVGGQRRGKPQGHDVDLLISSPGAEKEQEDQLLQKVMNLWKKQGLLLCGRLEWSQWEWGGSPSGKADEGDAEASCFLILKLYDHLVRKSKRNMPTGSNMGESKPWKAIKVDLLRCPRGSFAFAMLQWTGSRMFRRDLRWYALEEKNMMLDNHSLYDMTRGIQLPAKSEEEIFEHLGLEYLEPFERNA

SEQ ID NO: 4707 - DNA, 1584 bp, synthetic construct
  misc_feature 1..1584: note = Variant of terminal deoxynucleotidyltransferase
  source 1..1584: mol_type = other DNA
atgcaccatcatcatcatggcggtagcggcagccacggcattcgtaccatcgattcggacttcgggaagaaacagcagaaaaaaggcgataaccacgatagttccgccacttatgaaatcaaatttcacgagtttgtgctgttcattctcgaagaaaaaatgggtgcgacgcgtcgtacttttctgacagatttagcccgcaagaaagggttccgcgtcgagaatgaactgaccgacgaagttacccacatcgtggcagaaaatctgtcacgctctgaagtattggcttggctgaaagaacacaagatggagaagaccaagcaattcgaactgctggatattagctggcttatcgaaagcatgaaagttggtaaaccggtggacaccaaggggaaataccagttggcggaatcggttgaggtgagtgcgaacccagatccgacagaaggtcgtgtaaacgagctgcctcctactatgaaaaccgtttctccgtatgcgtgtcaacgccgcaccaccctgaacaaccgtaatcaacgttttacggactcgctggagattcttcgtgaaaattacgagctgaaaggcaacgacgatactgcgctggaatttcgtcgtgctatctccgtgctgaaaagccttccgtttgaggtacgtagcctgaaagacacggaaggattgccctggatcagtgatgaagtcaaagggattatggaagaaatcatcgaagtcggggagtcgcgtgaagtgcaggccgtgctcaatgatgagtggtatcaaagcttccacgcatttacgcgtgtctttggagtgggggtgaagacagcagacaagtggtaccgtatgggtctgcgcaccctcgaggatgttcgttccagcaagaccctgaagttgaccccgtggcagaaagtaggtctgaggtattatgaagatcttgctcgcggcgttacgcgtgccgaagctgacgcgatttggctgctggttcaggatgcagtcgcaactttcgacccggatgcgatcgtggagattgtcggtggacagcgtcgtgggaaacctcagggtcacgacgttgatctgcttatcagttctccgggagctgaaaaagagcaagaagaccaactcctgcagaaagtgatgaatctgtggaagaaacaagggttgttgctgtgtggtcgtctggaatggagtcagtgggaatgggggggttcgccttccggtaaggctgatgagggtgacgcggaggcgtcgtgctttctgatcctcaaactttatgatcatctggtgcgtaaaagtaaacgcaatatgccgactggttcgaacatgggcgagtccaaaccgtggaaagcaattaaagtagatctgctgcgttgcccccgcggcagttttgcgtttgcgatgttgcagtggaccggaagccgcatgttccgtcgtgatctgcgctggtacgccctggaagagaagaacatgatgctggacaatcattcgctgtatgacatgactcgtggtatccaactccctgctaaatcggaagaggaaattttcgaacatctggggcttgaatacctggaaccgttcgaacgtaacgca

SEQ ID NO: 4708 - protein, 528 aa, synthetic construct
  REGION 1..528: note = Variant of terminal deoxynucleotidyltransferase
MHHHHHGGSGSHGIRTIDSDFGKKQQKKGDNHDSSATYEIKFHEFVLFILEEKMGATRRTFLTDLARKKGFRVENELTDEVTHIVAENLSRSEVLAWLKEHKMEKTKQFELLDISWLIESMKVGKPVDTKGKYQLAESVEVSANPDPTEGRVNELPPTMKTVSPYACQRRTTLNNRNQRFTDSLEILRENYELKGNDDTALEFRRAISVLKSLPFEVRSLKDTEGLPWISDEVKGIMEEIIEVGESREVQAVLNDEWYQSFHAFTRVFGVGVKTADKWYRMGLRTLEDVRSSKTLKLTPWQKVGLRYYEDLARGVTRAEADAIWLLVQDAVATFDPDAIVEIVGGQRRGKPQGHDVDLLISSPGAEKEQEDQLLQKVMNLWKKQGLLLCGRLEWSQWEWGGSPSGKADEGDAEASCFLILKLYDHLVRKSKRNMPTGSNMGESKPWKAIKVDLLRCPRGSFAFAMLQWTGSRMFRRDLRWYALEEKNMMLDNHSLYDMTRGIQLPAKSEEEIFEHLGLEYLEPFERNA

SEQ ID NO: 4709 - DNA, 1584 bp, synthetic construct
  misc_feature 1..1584: note = Variant of terminal deoxynucleotidyltransferase
  source 1..1584: mol_type = other DNA
atgcaccatcatcatcatggcggtagcggcagccacggcattcgtaccatcgattcggacttcgggaagaaacagcagaaaaaaggcgataaccacgatagttccgccacttatgaaatcaaatttcacgagtttgtgctgttcattctcgaagaaaaaatgggtgcgacgcgtcgtacttttctgacagatttagcccgcaagaaagggttccgcgtcgagaatgaactgaccgacgaagttacccacatcgtggcagaaaatctgtcacgctctgaagtattggcttggctgaaagaacacaagatggagaagaccaagcaattcgaactgctggatattagctggcttatcgaaagcatgaaagttggtaaaccggtggacaccaaggggaaataccagttggcggaatcggttgaggtgagtgcgaacccagatccgacagaaggtcgtgtaaacgagctgcctcctactatgaaaaccgtttctccgtatgcgtgtcaacgccgcaccaccctgaacaaccgtaatcaacgttttacggactcgctggagattcttcgtgaaaattacgagctgaaaggcaacgacgatactgcgctggaatttcgtcgtgctatctccgtgctgaaaagccttccgtttgaggtacgtagcctgaaagacacggaaggattgccctggatcagtgatgaagtcaaagggattatggaagaaatcatcgaagtcggggagtcgcgtgaagtgcaggccgtgctcaatgatgagtggtatcaaagcttccacgcatttacgcgtgtctttggagtgggggtgaagacagcagacaagtggtaccgtatgggtctgcgcaccctcgaggatgttcgttccagcaagaccctgaagttgaccccgtggcagaaagtaggtctgctgtattatgaagatcttgctcgcggcgttacgcgtgccgaagctgacgcgatttggctgctggttcaggatgcagtcgcaactttcgacccggatgcgatcgtggagattgtcggtggacagcgtcgtgggaaacctcagggtcacgacgttgatctgcttatcagttctccgggagctgaaaaagagcaagaagaccaactcctgcagaaagtgatgaatctgtggaagaaacaagggttgttgctgtgtggtcgtctggaatggagtcagtgggaatgggggggttcgccttccggtaaggctgatgagggtgacgcggaggcgtcgtgctttctgatcctcaaactttatgatcatctggtgcgtaaaagtaaacgcaatatgccgactggttcgaacatgggcgagtccaaaccgtggaaagcaattaaactggatctgctgcgttgcccccgcggcagttttgcgtttgcgatgttgcagtggaccggaagccgcatgttccgtcgtgatctgcgctggtacgccctggaagagaagaacatgatgctggacaatcattcgctgtatgacatgactcgtggtatccaactccctgctaaatcggaagaggaaattttcgaacatctggggcttgaatacctggaaccgttcgaacgtaacgca

SEQ ID NO: 4710 - protein, 528 aa, synthetic construct
  REGION 1..528: note = Variant of terminal deoxynucleotidyltransferase
MHHHHHGGSGSHGIRTIDSDFGKKQQKKGDNHDSSATYEIKFHEFVLFILEEKMGATRRTFLTDLARKKGFRVENELTDEVTHIVAENLSRSEVLAWLKEHKMEKTKQFELLDISWLIESMKVGKPVDTKGKYQLAESVEVSANPDPTEGRVNELPPTMKTVSPYACQRRTTLNNRNQRFTDSLEILRENYELKGNDDTALEFRRAISVLKSLPFEVRSLKDTEGLPWISDEVKGIMEEIIEVGESREVQAVLNDEWYQSFHAFTRVFGVGVKTADKWYRMGLRTLEDVRSSKTLKLTPWQKVGLLYYEDLARGVTRAEADAIWLLVQDAVATFDPDAIVEIVGGQRRGKPQGHDVDLLISSPGAEKEQEDQLLQKVMNLWKKQGLLLCGRLEWSQWEWGGSPSGKADEGDAEASCFLILKLYDHLVRKSKRNMPTGSNMGESKPWKAIKLDLLRCPRGSFAFAMLQWTGSRMFRRDLRWYALEEKNMMLDNHSLYDMTRGIQLPAKSEEEIFEHLGLEYLEPFERNA

SEQ ID NO: 4711 - DNA, 1584 bp, synthetic construct
  misc_feature 1..1584: note = Variant of terminal deoxynucleotidyltransferase
  source 1..1584: mol_type = other DNA
atgcaccatcatcatcatggcggtagcggcagccacggcattcgtaccatcgattcggacttcgggaagaaacagcagaaaaaaggcgataaccacgatagttccgccacttatgaaatcaaatttcacgagtttgtgctgttcattctcgaagaaaaaatgggtgcgacgcgtcgtacttttctgacagatttagcccgcaagaaagggttccgcgtcgagaatgaactgaccgacgaagttacccacatcgtggcagaaaatctgtcacgctctgaagtattggcttggctgaaagaacacaagatggagaagaccaagcaattcgaactgctggatattagctggcttatcgaaagcatgaaagttggtaaaccggtggacaccaaggggaaataccagttggcggaatcggttgaggtgagtgcgaacccagatccgacagaaggtcgtgtaaacgagctgcctcctactatgaaaaccgtttctccgtatgcgtgtcaacgccgcaccaccctgaacaaccgtaatcaacgttttacggactcgctggagattcttcgtgaaaattacgagctgaaaggcaacgacgatactgcgctggaatttcgtcgtgctatctccgtgctgaaaagccttccgtttgaggtacgtagcctgaaagacacggaaggattgccctggatcagtgatgaagtcaaagggattatggaagaaatcatcgaagtcggggagtcgcgtgaagtgcaggccgtgctcaatgatgagtggtatcaaagcttccacgcatttacgcgtgtctttggagtgggggtgaagacagcagacaagtggtaccgtatgggtctgcgcaccctcgaggatgttcgttccagcaagaccctgaagttgaccccgtggcagaaagtaggtctgctgtattatgaagatcttgctcgcggcgttacgcgtgccgaagctgacgcgatttggctgctggttcaggatgcagtcgcaactttcgacccggatgcgatcgtggagattgtcggtggacagcgtcgtgggaaacctcagggtcacgacgttgatctgcttatcagttctccgggagctgaaaaagagcaagaagaccaactcctgcagaaagtgatgaatctgtggaagaaacaagggttgttgctgtgtggtcgtctggaattgagtcagtgggaatgggggggttcgccttccggtaaggctgatgagggtgacgcggaggcgtcgtgctttctgatcctcaaactttatgatcatctggtgcgtaaaagtaaacgcaatatgccgactggttcgaacatgggcgagtccaaaccgtggaaagcaattaaagtagatctgctgcgttgcccccgcggcagttttgcgtttgcgatgttgcagtggaccggaagccgcatgttccgtcgtgatctgcgctggtacgccctggaagagaagaacatgatgctggacaatcattcgctgtatgacatgactcgtggtatccaactccctgctaaatcggaagaggaaattttcgaacatctggggcttgaatacctggaaccgttcgaacgtaacgca

SEQ ID NO: 4712 - protein, 528 aa, synthetic construct
  REGION 1..528: note = Variant of terminal deoxynucleotidyltransferase
MHHHHHGGSGSHGIRTIDSDFGKKQQKKGDNHDSSATYEIKFHEFVLFILEEKMGATRRTFLTDLARKKGFRVENELTDEVTHIVAENLSRSEVLAWLKEHKMEKTKQFELLDISWLIESMKVGKPVDTKGKYQLAESVEVSANPDPTEGRVNELPPTMKTVSPYACQRRTTLNNRNQRFTDSLEILRENYELKGNDDTALEFRRAISVLKSLPFEVRSLKDTEGLPWISDEVKGIMEEIIEVGESREVQAVLNDEWYQSFHAFTRVFGVGVKTADKWYRMGLRTLEDVRSSKTLKLTPWQKVGLLYYEDLARGVTRAEADAIWLLVQDAVATFDPDAIVEIVGGQRRGKPQGHDVDLLISSPGAEKEQEDQLLQKVMNLWKKQGLLLCGRLELSQWEWGGSPSGKADEGDAEASCFLILKLYDHLVRKSKRNMPTGSNMGESKPWKAIKVDLLRCPRGSFAFAMLQWTGSRMFRRDLRWYALEEKNMMLDNHSLYDMTRGIQLPAKSEEEIFEHLGLEYLEPFERNA

SEQ ID NO: 4713 - DNA, 1584 bp, synthetic construct
  misc_feature 1..1584: note = Variant of terminal deoxynucleotidyltransferase
  source 1..1584: mol_type = other DNA
atgcaccatcatcatcatggcggtagcggcagccacggcattcgtaccatcgattcggacttcgggaagaaacagcagaaaaaaggcgataaccacgatagttccgccacttatgaaatcaaatttcacgagtttgtgctgttcattctcgaagaaaaaatgggtgcgacgcgtcgtacttttctgacagatttagcccgcaagaaagggttccgcgtcgagaatgaactgaccgacgaagttacccacatcgtggcagaaaatctgtcacgctctgaagtattggcttggctgaaagaacacaagatggagaagaccaagcaattcgaactgctggatattagctggcttatcgaaagcatgaaagttggtaaaccggtggacaccaaggggaaataccagttggcggaatcggttgaggtgagtgcgaacccagatccgacagaaggtcgtgtaaacgagctgcctcctactatgaaaaccgtttctccgtatgcgtgtcaacgccgcaccaccctgaacaaccgtaatcaacgttttacggactcgctggagattcttcgtgaaaattacgagctgaaaggcaacgacgatactgcgctggaatttcgtcgtgctatctccgtgctgaaaagccttccgtttgaggtacgtagcctgaaagacacggaaggattgccctggatcagtgatgaagtcaaagggattatggaagaaatcatcgaagtcggggagtcgcgtgaagtgcaggccgtgctcaatgatgagtggtatcaaagcttccacgcatttacgcgtgtctttggagtgggggtgaagacagcagacaagtggtaccgtatgggtctgcgcaccctcgaggatgttcgttccagcaagaccctgaagttgaccccgtggcagaaagtaggtctgctgtattatgaagatcttgctcgcggcgttacgcgtgccgaagctgacgcgatttggctgctggttcaggatgcagtcgcaactttcgacccggatgcgatcgtggagattgtcggtggacagcgtcgtgggaaacctcagggtcacgacgttgatctgcttatcagttctccgggagctgaaaaagagcaagaagaccaactcctgcagaaagtgatgaatctgtggaagaaacaagggttgttgctgtgtggtcgtctggaatggagtcagtgggaatgggggggttcgccttccggtaaggctgatgagggtgacgcggaggcgtcgtgctttctgatcctcaaactttatgatcatctggtgcgtaaaagtaaacgcaatatgccgactggttcgaacatgggcgagtccaaaccgtggaaagcaattaaagtagatctgctgcgttgcccccgcggcagttttgcgtttgcgatgttgcagtggaccggaagccgcatgttccgtcgtgatctgcgctggtacgccctggaagagaagaacatgatgctggacaataagtcgctgtatgacatgactcgtggtatccaactccctgctaaatcggaagaggaaattttcgaacatctggggcttgaatacctggaaccgttcgaacgtaacgca

SEQ ID NO: 4714 - protein, 528 aa, synthetic construct
  REGION 1..528: note = Variant of terminal deoxynucleotidyltransferase
MHHHHHGGSGSHGIRTIDSDFGKKQQKKGDNHDSSATYEIKFHEFVLFILEEKMGATRRTFLTDLARKKGFRVENELTDEVTHIVAENLSRSEVLAWLKEHKMEKTKQFELLDISWLIESMKVGKPVDTKGKYQLAESVEVSANPDPTEGRVNELPPTMKTVSPYACQRRTTLNNRNQRFTDSLEILRENYELKGNDDTALEFRRAISVLKSLPFEVRSLKDTEGLPWISDEVKGIMEEIIEVGESREVQAVLNDEWYQSFHAFTRVFGVGVKTADKWYRMGLRTLEDVRSSKTLKLTPWQKVGLLYYEDLARGVTRAEADAIWLLVQDAVATFDPDAIVEIVGGQRRGKPQGHDVDLLISSPGAEKEQEDQLLQKVMNLWKKQGLLLCGRLEWSQWEWGGSPSGKADEGDAEASCFLILKLYDHLVRKSKRNMPTGSNMGESKPWKAIKVDLLRCPRGSFAFAMLQWTGSRMFRRDLRWYALEEKNMMLDNKSLYDMTRGIQLPAKSEEEIFEHLGLEYLEPFERNA

SEQ ID NO: 4715 - DNA, 1584 bp, synthetic construct
  misc_feature 1..1584: note = Variant of terminal deoxynucleotidyltransferase
  source 1..1584: mol_type = other DNA
atgcaccatcatcatcatggcggtagcggcagccacggcattcgtaccatcgattcggacttcgggaagaaacagcagaaaaaaggcgataaccacgatagttccgccacttatgaaatcaaatttcacgagtttgtgctgttcattctcgaagaaaaaatgggtgcgacgcgtcgtacttttctgacagatttagcccgcaagaaagggttccgcgtcgagaatgaactgaccgacgaagttacccacatcgtggcagaaaatctgtcacgctctgaagtattggcttggctgaaagaacacaagatggagaagaccaagcaattcgaactgctggatattagctggcttatcgaaagcatgaaagttggtaaaccggtggacaccaaggggaaataccagttggcggaatcggttgaggtgagtgcgaacccagatccgacagaaggtcgtgtaaacgagctgcctcctactatgaaaaccgtttctccgtatgcgtgtcaacgccgcaccaccctgaacaaccgtaatcaacgttttacggactcgctggagattcttcgtgaaaattacgagctgaaaggcaacgacgatactgcgctggaatttcgtcgtgctatctccgtgctgaaaagccttccgtttgaggtacgtagcctgaaagacacggaaggattgccctggatcagtgatgaagtcaaagggattatggaagaaatcatcgaagtcggggagtcgcgtgaagtgcaggccgtgctcaatgatgagtggtatcaaagcttccacgcatttacgcgtgtctttggagtgggggtgaagacagcagacaagtggtaccgtatgggtctgcgcaccctcgaggatgttcgttccagcaagaccctgaagttgaccccgtggcagaaagtaggtctgctgtattatgaagatcttgctctgggcgttacgcgtgccgaagctgacgcgatttggctgctggttcaggatgcagtcgcaactttcgacccggatgcgatcgtggagattgtcggtggacagcgtcgtgggaaacctcagggtcacgacgttgatctgcttatcagttctccgggagctgaaaaagagcaagaagaccaactcctgcagaaagtgatgaatctgtggaagaaacaagggttgttgctgtgtggtcgtctggaatggagtcagtgggaatgggggggttcgccttccggtaaggctgatgagggtgacgcggaggcgtcgtgctttctgatcctcaaactttatgatcatctggtgcgtaaaagtaaacgcaatatgccgactggttcgaacatgggcgagtccaaaccgtggaaagcaattaaagtagatctgctgcgttgcccccgcggcagttttgcgtttgcgatgttgcagtggaccggaagccgcatgttccgtcgtgatctgcgctggtacgccctggaagagaagaacatgatgctggacaatcattcgctgtatgacatgactcgtggtatccaactccctgctaaatcggaagaggaaattttcgaacatctggggcttgaatacctggaaccgttcgaacgtaacgca

SEQ ID NO: 4716 - protein, 528 aa, synthetic construct
  REGION 1..528: note = Variant of terminal deoxynucleotidyltransferase
MHHHHHGGSGSHGIRTIDSDFGKKQQKKGDNHDSSATYEIKFHEFVLFILEEKMGATRRTFLTDLARKKGFRVENELTDEVTHIVAENLSRSEVLAWLKEHKMEKTKQFELLDISWLIESMKVGKPVDTKGKYQLAESVEVSANPDPTEGRVNELPPTMKTVSPYACQRRTTLNNRNQRFTDSLEILRENYELKGNDDTALEFRRAISVLKSLPFEVRSLKDTEGLPWISDEVKGIMEEIIEVGESREVQAVLNDEWYQSFHAFTRVFGVGVKTADKWYRMGLRTLEDVRSSKTLKLTPWQKVGLLYYEDLALGVTRAEADAIWLLVQDAVATFDPDAIVEIVGGQRRGKPQGHDVDLLISSPGAEKEQEDQLLQKVMNLWKKQGLLLCGRLEWSQWEWGGSPSGKADEGDAEASCFLILKLYDHLVRKSKRNMPTGSNMGESKPWKAIKVDLLRCPRGSFAFAMLQWTGSRMFRRDLRWYALEEKNMMLDNHSLYDMTRGIQLPAKSEEEIFEHLGLEYLEPFERNA

SEQ ID NO: 4717 - DNA, 1584 bp, synthetic construct
  misc_feature 1..1584: note = Variant of terminal deoxynucleotidyltransferase
  source 1..1584: mol_type = other DNA
atgcaccatcatcatcatggcggtagcggcagccacggcattcgtaccatcgattcggacttcgggaagaaacagcagaaaaaaggcgataaccacgatagttccgccacttatgaaatcaaatttcacgagtttgtgctgttcattctcgaagaaaaaatgggtgcgacgcgtcgtacttttctgacagatttagcccgcaagaaagggttccgcgtcgagaatgaactgaccgacgaagttacccacatcgtggcagaaaatctgtcacgctctgaagtattggcttggctgaaagaacacaagatggagaagaccaagcaattcgaactgctggatattagctggcttatcgaaagcatgaaagttggtaaaccggtggacaccaaggggaaataccagttggcggaatcggttgaggtgagtgcgaacccagatccgacagaaggtcgtgtaaacgagctgcctcctactatgaaaaccgtttctccgtatgcgtgtcaacgccgcaccaccctgaacaaccgtaatcaacgttttacggactcgctggagattcttcgtgaaaattacgagctgaaaggcaacgacgatactgcgctggaatttcgtcgtgctatctccgtgctgaaaagccttccgtttgaggtacgtagcctgaaagacacggaaggattgccctggatcagtgatgaagtcaaagggattatggaagaaatcatcgaagtcggggagtcgcgtgaagtgcaggccgtgctcaatgatgagtggtatcaaagcttccacgcatttacgcgtgtctttggagtgggggtgaagacagcagacaagtggtaccgtatgggtctgcgcaccctcgaggatgttcgttccagcaagaccctgaagttgaccccgtggcagaaagtaggtctgctgtattatgaagatcttgctcgcggcgttacgcgtacggaagctgacgcgatttggctgctggttcaggatgcagtcgcaactttcgacccggatgcgatcgtggagattgtcggtggacagcgtcgtgggaaacctcagggtcacgacgttgatctgcttatcagttctccgggagctgaaaaagagcaagaagaccaactcctgcagaaagtgatgaatctgtggaagaaacaagggttgttgctgtgtggtcgtctggaatggagtcagtgggaatgggggggttcgccttccggtaaggctgatgagggtgacgcggaggcgtcgtgctttctgatcctcaaactttatgatcatctggtgcgtaaaagtaaacgcaatatgccgactggttcgaacatgggcgagtccaaaccgtggaaagcaattaaagtagatctgctgcgttgcccccgcggcagttttgcgtttgcgatgttgcagtggaccggaagccgcatgttccgtcgtgatctgcgctggtacgccctggaagagaagaacatgatgctggacaatcattcgctgtatgacatgactcgtggtatccaactccctgctaaatcggaagaggaaattttcgaacatctggggcttgaatacctggaaccgttcgaacgtaacgca

SEQ ID NO: 4718 - protein, 528 aa, synthetic construct
  REGION 1..528: note = Variant of terminal deoxynucleotidyltransferase
MHHHHHGGSGSHGIRTIDSDFGKKQQKKGDNHDSSATYEIKFHEFVLFILEEKMGATRRTFLTDLARKKGFRVENELTDEVTHIVAENLSRSEVLAWLKEHKMEKTKQFELLDISWLIESMKVGKPVDTKGKYQLAESVEVSANPDPTEGRVNELPPTMKTVSPYACQRRTTLNNRNQRFTDSLEILRENYELKGNDDTALEFRRAISVLKSLPFEVRSLKDTEGLPWISDEVKGIMEEIIEVGESREVQAVLNDEWYQSFHAFTRVFGVGVKTADKWYRMGLRTLEDVRSSKTLKLTPWQKVGLLYYEDLARGVTRTEADAIWLLVQDAVATFDPDAIVEIVGGQRRGKPQGHDVDLLISSPGAEKEQEDQLLQKVMNLWKKQGLLLCGRLEWSQWEWGGSPSGKADEGDAEASCFLILKLYDHLVRKSKRNMPTGSNMGESKPWKAIKVDLLRCPRGSFAFAMLQWTGSRMFRRDLRWYALEEKNMMLDNHSLYDMTRGIQLPAKSEEEIFEHLGLEYLEPFERNA

SEQ ID NO: 4719 - DNA, 1584 bp, synthetic construct
  misc_feature 1..1584: note = Variant of terminal deoxynucleotidyltransferase
  source 1..1584: mol_type = other DNA
atgcaccatcatcatcatggcggtagcggcagccacggcattcgtaccatcgattcggacttcgggaagaaacagcagaaaaaaggcgataaccacgatagttccgccacttatgaaatcaaatttcacgagtttgtgctgttcattctcgaagaaaaaatgggtgcgacgcgtcgtacttttctgacagatttagcccgcaagaaagggttccgcgtcgagaatgaactgaccgacgaagttacccacatcgtggcagaaaatctgtcacgctctgaagtattggcttggctgaaagaacacaagatggagaagaccaagcaattcgaactgctggatattagctggcttatcgaaagcatgaaagttggtaaaccggtggacaccaaggggaaataccagttggcggaatcggttgaggtgagtgcgaacccagatccgacagaaggtcgtgtaaacgagctgcctcctactatgaaaaccgtttctccgtatgcgtgtcaacgccgcaccaccctgaacaaccgtaatcaacgttttacggactcgctggagattcttcgtgaaaattacgagctgaaaggcaacgacgatactgcgctggaatttcgtcgtgctatctccgtgctgaaaagccttccgtttgaggtacgtagcctgaaagacacggaaggattgccctggatcagtgatgaagtcaaagggattatggaagaaatcatcgaagtcggggagtcgcgtgaagtgcaggccgtgctcaatgatgagtggtattgtagcttccacgcatttacgcgtgtctttggagtgggggtgaagacagcagacaagtggtaccgtatgggtctgcgcaccctcgaggatgttcgttccagcaagaccctgaagttgaccccgtggcagaaagtaggtctgctgtattatgaagatcttgctcgcggcgttacgcgtgccgaagctgacgcgatttggctgctggttcaggatgcagtcgcaactttcgacccggatgcgatcgtggagattgtcggtggacagcgtcgtgggaaacctcagggtcacgacgttgatctgcttatcagttctccgggagctgaaaaagagcaagaagaccaactcctgcagaaagtgatgaatctgtggaagaaacaagggttgttgctgtgtggtcgtctggaatggagtcagtgggaatgggggggttcgccttccggtaaggctgatgagggtgacgcggaggcgtcgtgctttctgatcctcaaactttatgatcatctggtgcgtaaaagtaaacgcaatatgccgactggttcgaacatgggcgagtccaaaccgtggaaagcaattaaagtagatctgctgcgttgcccccgcggcagttttgcgtttgcgatgttgcagtggaccggaagccgcatgttccgtcgtgatctgcgctggtacgccctggaagagaagaacatgatgctggacaatcattcgctgtatgacatgactcgtggtatccaactccctgctaaatcggaagaggaaattttcgaacatctggggcttgaatacctggaaccgttcgaacgtaacgca

SEQ ID NO: 4720 - protein, 528 aa, synthetic construct
  REGION 1..528: note = Variant of terminal deoxynucleotidyltransferase
MHHHHHGGSGSHGIRTIDSDFGKKQQKKGDNHDSSATYEIKFHEFVLFILEEKMGATRRTFLTDLARKKGFRVENELTDEVTHIVAENLSRSEVLAWLKEHKMEKTKQFELLDISWLIESMKVGKPVDTKGKYQLAESVEVSANPDPTEGRVNELPPTMKTVSPYACQRRTTLNNRNQRFTDSLEILRENYELKGNDDTALEFRRAISVLKSLPFEVRSLKDTEGLPWISDEVKGIMEEIIEVGESREVQAVLNDEWYCSFHAFTRVFGVGVKTADKWYRMGLRTLEDVRSSKTLKLTPWQKVGLLYYEDLARGVTRAEADAIWLLVQDAVATFDPDAIVEIVGGQRRGKPQGHDVDLLISSPGAEKEQEDQLLQKVMNLWKKQGLLLCGRLEWSQWEWGGSPSGKADEGDAEASCFLILKLYDHLVRKSKRNMPTGSNMGESKPWKAIKVDLLRCPRGSFAFAMLQWTGSRMFRRDLRWYALEEKNMMLDNHSLYDMTRGIQLPAKSEEEIFEHLGLEYLEPFERNA

SEQ ID NO: 4721 - DNA, 1584 bp, synthetic construct
  misc_feature 1..1584: note = Variant of terminal deoxynucleotidyltransferase
  source 1..1584: mol_type = other DNA
atgcaccatcatcatcatggcggtagcggcagccacggcattcgtaccatcgattcggacttcgggaagaaacagcagaaaaaaggcgataaccacgatagttccgccacttatgaaatcaaatttcacgagtttgtgctgttcattctcgaagaaaaaatgggtgcgacgcgtcgtacttttctgacagatttagcccgcaagaaagggttccgcgtcgagaatgaactgaccgacgaagttacccacatcgtggcagaaaatctgtcacgctctgaagtattggcttggctgaaagaacacaagatggagaagaccaagcaattcgaactgctggatattagctggcttatcgaaagcatgaaagttggtaaaccggtggacaccaaggggaaataccagttggcggaatcggttgaggtgagtgcgaacccagatccgacagaaggtcgtgtaaacgagctgcctcctactatgaaaaccgtttctccgtatgcgtgtcaacgccgcaccaccctgaacaaccgtaatcaacgttttacggactcgctggagattcttcgtgaaaattacgagctgaaaggcaacgacgatactgcgctggaatttcgtcgtgctatctccgtgctgaaaagccttccgtttgaggtacgtagcctgaaagacacggaaggattgccctggatcagtgatgaagtcaaagggattatggaagaaatcatcgaagtcggggagtcgcgtgaagtgcaggccgtgctcaatgatgagtggtatcaagctttccacgcatttacgcgtgtctttggagtgggggtgaagacagcagacaagtggtaccgtatgggtctgcgcaccctcgaggatgttcgttccagcaagaccctgaagttgaccccgtggcagaaagtaggtctgctgtattatgaagatcttgctcgcggcgttacgcgtgccgaagctgacgcgatttggctgctggttcaggatgcagtcgcaactttcgacccggatgcgatcgtggagattgtcggtggacagcgtcgtgggaaacctcagggtcacgacgttgatctgcttatcagttctccgggagctgaaaaagagcaagaagaccaactcctgcagaaagtgatgaatctgtggaagaaacaagggttgttgctgtgtggtcgtctggaatggagtcagtgggaatgggggggttcgccttccggtaaggctgatgagggtgacgcggaggcgtcgtgctttctgatcctcaaactttatgatcatctggtgcgtaaaagtaaacgcaatatgccgactggttcgaacatgggcgagtccaaaccgtggaaagcaattaaagtagatctgctgcgttgcccccgcggcagttttgcgtttgcgatgttgcagtggaccggaagccgcatgttccgtcgtgatctgcgctggtacgccctggaagagaagaacatgatgctggacaatcattcgctgtatgacatgactcgtggtatccaactccctgctaaatcggaagaggaaattttcgaacatctggggcttgaatacctggaaccgttcgaacgtaacgca

SEQ ID NO: 4722 - protein, 528 aa, synthetic construct
  REGION 1..528: note = Variant of terminal deoxynucleotidyltransferase
MHHHHHGGSGSHGIRTIDSDFGKKQQKKGDNHDSSATYEIKFHEFVLFILEEKMGATRRTFLTDLARKKGFRVENELTDEVTHIVAENLSRSEVLAWLKEHKMEKTKQFELLDISWLIESMKVGKPVDTKGKYQLAESVEVSANPDPTEGRVNELPPTMKTVSPYACQRRTTLNNRNQRFTDSLEILRENYELKGNDDTALEFRRAISVLKSLPFEVRSLKDTEGLPWISDEVKGIMEEIIEVGESREVQAVLNDEWYQAFHAFTRVFGVGVKTADKWYRMGLRTLEDVRSSKTLKLTPWQKVGLLYYEDLARGVTRAEADAIWLLVQDAVATFDPDAIVEIVGGQRRGKPQGHDVDLLISSPGAEKEQEDQLLQKVMNLWKKQGLLLCGRLEWSQWEWGGSPSGKADEGDAEASCFLILKLYDHLVRKSKRNMPTGSNMGESKPWKAIKVDLLRCPRGSFAFAMLQWTGSRMFRRDLRWYALEEKNMMLDNHSLYDMTRGIQLPAKSEEEIFEHLGLEYLEPFERNA

SEQ ID NO: 4723 - DNA, 1584 bp, synthetic construct
  misc_feature 1..1584: note = Variant of terminal deoxynucleotidyltransferase
  source 1..1584: mol_type = other DNA
atgcaccatcatcatcatggcggtagcggcagccacggcattcgtaccatcgattcggacttcgggaagaaacagcagaaaaaaggcgataaccacgatagttccgccacttatgaaatcaaatttcacgagtttgtgctgttcattctcgaagaaaaaatgggtgcgacgcgtcgtacttttctgacagatttagcccgcaagaaagggttccgcgtcgagaatgaactgaccgacgaagttacccacatcgtggcagaaaatctgtcacgctctgaagtattggcttggctgaaagaacacaagatggagaagaccaagcaattcgaactgctggatattagctggcttatcgaaagcatgaaagttggtaaaccggtggacaccaaggggaaataccagttggcggaatcggttgaggtgagtgcgaacccagatccgacagaaggtcgtgtaaacgagctgcctcctactatgaaaaccgtttctccgtatgcgtgtcaacgccgcaccaccctgaacaaccgtaatcaacgttttacggactcgctggagattcttcgtgaaaattacgagctgaaaggcaacgacgatactgcgctggaatttcgtcgtgctatctccgtgctgaaaagccttccgtttgaggtacgtagcctgaaagacacggaaggattgccctggatcagtgatgaagtcaaagggattatggaagaaatcatcgaagtcggggagtcgcgtgaagtgcaggccgtgctcaatgatgagtggtatcaaagcttccacgcatttacgcgtgtctttggagtgggggtgaagacagcagacaagtggtaccgtatgggtctgcgcaccctcgaggatgttcgttccagcaagaccctgaagttgaccccgtggcagaaagtaggtctgctgtattatgaagatcttgctcgcggcgttacgcgtgccgaagctgacgcgatttggctgctggttcaggatgcagtcgcaactttcgacccggatgcgatcgtggagattgtcggtggacagcgtcgtgggaaacctcagggtcacgacgttgatctgcttatcagttctccgggagctgaaaaagagcaagaagaccaactcctgcagaaagtgatgaatctgtggaagaaacaagggttgttgctgtgtggtcgtctggaatatagtcagtgggaatgggggggttcgccttccggtaaggctgatgagggtgacgcggaggcgtcgtgctttctgatcctcaaactttatgatcatctggtgcgtaaaagtaaacgcaatatgccgactggttcgaacatgggcgagtccaaaccgtggaaagcaattaaagtagatctgctgcgttgcccccgcggcagttttgcgtttgcgatgttgcagtggaccggaagccgcatgttccgtcgtgatctgcgctggtacgccctggaagagaagaacatgatgctggacaatcattcgctgtatgacatgactcgtggtatccaactccctgctaaatcggaagaggaaattttcgaacatctggggcttgaatacctggaaccgttcgaacgtaacgca

SEQ ID NO: 4724 - protein, 528 aa, synthetic construct
  REGION 1..528: note = Variant of terminal deoxynucleotidyltransferase
MHHHHHGGSGSHGIRTIDSDFGKKQQKKGDNHDSSATYEIKFHEFVLFILEEKMGATRRTFLTDLARKKGFRVENELTDEVTHIVAENLSRSEVLAWLKEHKMEKTKQFELLDISWLIESMKVGKPVDTKGKYQLAESVEVSANPDPTEGRVNELPPTMKTVSPYACQRRTTLNNRNQRFTDSLEILRENYELKGNDDTALEFRRAISVLKSLPFEVRSLKDTEGLPWISDEVKGIMEEIIEVGESREVQAVLNDEWYQSFHAFTRVFGVGVKTADKWYRMGLRTLEDVRSSKTLKLTPWQKVGLLYYEDLARGVTRAEADAIWLLVQDAVATFDPDAIVEIVGGQRRGKPQGHDVDLLISSPGAEKEQEDQLLQKVMNLWKKQGLLLCGRLEYSQWEWGGSPSGKADEGDAEASCFLILKLYDHLVRKSKRNMPTGSNMGESKPWKAIKVDLLRCPRGSFAFAMLQWTGSRMFRRDLRWYALEEKNMMLDNHSLYDMTRGIQLPAKSEEEIFEHLGLEYLEPFERNA

SEQ ID NO: 4725 - DNA, 1584 bp, synthetic construct
  misc_feature 1..1584: note = Variant of terminal deoxynucleotidyltransferase
  source 1..1584: mol_type = other DNA
atgcaccatcatcatcatggcggtagcggcagccacggcattcgtaccatcgattcggacttcgggaagaaacagcagaaaaaaggcgataaccacgatagttccgccacttatgaaatcaaatttcacgagtttgtgctgttcattctcgaagaaaaaatgggtgcgacgcgtcgtacttttctgacagatttagcccgcaagaaagggttccgcgtcgagaatgaactgaccgacgaagttacccacatcgtggcagaaaatctgtcacgctctgaagtattggcttggctgaaagaacacaagatggagaagaccaagcaattcgaactgctggatattagctggcttatcgaaagcatgaaagttggtaaaccggtggacaccaaggggaaataccagttggcggaatcggttgaggtgagtgcgaacccagatccgacagaaggtcgtgtaaacgagctgcctcctactatgaaaaccgtttctccgtatgcgtgtcaacgccgcaccaccctgaacaaccgtaatcaacgttttacggactcgctggagattcttcgtgaaaattacgagctgaaaggcaacgacgatactgcgctggaatttcgtcgtgctatctccgtgctgaaaagccttccgtttgaggtacgtagcctgaaagacacggaaggattgccctggatcagtgatgaagtcaaagggattatggaagaaatcatcgaagtcggggagtcgcgtgaagtgcaggccgtgctcaatgatgagtggtatcaaagcttccacgcatttacgcgtgtctttggagtgggggtgaagacagcagacaagtggtaccgtatgggtctgcgcaccctcgaggatgttcgttccagcaagaccctgaagttgaccccgtggcagaaagtaggtctgctgtattatgaagatcttgctcgcggcgttacgcgtaatgaagctgacgcgatttggctgctggttcaggatgcagtcgcaactttcgacccggatgcgatcgtggagattgtcggtggacagcgtcgtgggaaacctcagggtcacgacgttgatctgcttatcagttctccgggagctgaaaaagagcaagaagaccaactcctgcagaaagtgatgaatctgtggaagaaacaagggttgttgctgtgtggtcgtctggaatggagtcagtgggaatgggggggttcgccttccggtaaggctgatgagggtgacgcggaggcgtcgtgctttctgatcctcaaactttatgatcatctggtgcgtaaaagtaaacgcaatatgccgactggttcgaacatgggcgagtccaaaccgtggaaagcaattaaagtagatctgctgcgttgcccccgcggcagttttgcgtttgcgatgttgcagtggaccggaagccgcatgttccgtcgtgatctgcgctggtacgccctggaagagaagaacatgatgctggacaatcattcgctgtatgacatgactcgtggtatccaactccctgctaaatcggaagaggaaattttcgaacatctggggcttgaatacctggaaccgttcgaacgtaacgca

SEQ ID NO: 4726 - protein, 528 aa, synthetic construct
  REGION 1..528: note = Variant of terminal deoxynucleotidyltransferase
MHHHHHGGSGSHGIRTIDSDFGKKQQKKGDNHDSSATYEIKFHEFVLFILEEKMGATRRTFLTDLARKKGFRVENELTDEVTHIVAENLSRSEVLAWLKEHKMEKTKQFELLDISWLIESMKVGKPVDTKGKYQLAESVEVSANPDPTEGRVNELPPTMKTVSPYACQRRTTLNNRNQRFTDSLEILRENYELKGNDDTALEFRRAISVLKSLPFEVRSLKDTEGLPWISDEVKGIMEEIIEVGESREVQAVLNDEWYQSFHAFTRVFGVGVKTADKWYRMGLRTLEDVRSSKTLKLTPWQKVGLLYYEDLARGVTRNEADAIWLLVQDAVATFDPDAIVEIVGGQRRGKPQGHDVDLLISSPGAEKEQEDQLLQKVMNLWKKQGLLLCGRLEWSQWEWGGSPSGKADEGDAEASCFLILKLYDHLVRKSKRNMPTGSNMGESKPWKAIKVDLLRCPRGSFAFAMLQWTGSRMFRRDLRWYALEEKNMMLDNHSLYDMTRGIQLPAKSEEEIFEHLGLEYLEPFERNA

SEQ ID NO: 4727 - DNA, 1584 bp, synthetic construct
  misc_feature 1..1584: note = Variant of terminal deoxynucleotidyltransferase
  source 1..1584: mol_type = other DNA
atgcaccatcatcatcatggcggtagcggcagccacggcattcgtaccatcgattcggacttcgggaagaaacagcagaaaaaaggcgataaccacgatagttccgccacttatgaaatcaaatttcacgagtttgtgctgttcattctcgaagaaaaaatgggtgcgacgcgtcgtacttttctgacagatttagcccgcaagaaagggttccgcgtcgagaatgaactgaccgacgaagttacccacatcgtggcagaaaatctgtcacgctctgaagtattggcttggctgaaagaacacaagatggagaagaccaagcaattcgaactgctggatattagctggcttatcgaaagcatgaaagttggtaaaccggtggacaccaaggggaaataccagttggcggaatcggttgaggtgagtgcgaacccagatccgacagaaggtcgtgtaaacgagctgcctcctactatgaaaaccgtttctccgtatgcgtgtcaacgccgcaccaccctgaacaaccgtaatcaacgttttacggactcgctggagattcttcgtgaaaattacgagctgaaaggcaacgacgatactgcgctggaatttcgtcgtgctatctccgtgctgaaaagccttccgtttgaggtacgtagcctgaaagacacggaaggattgccctggatcagtgatgaagtcaaagggattatggaagaaatcatcgaagtcggggagtcgcgtgaagtgcaggccgtgctcaatgatgagtggtatcaaagcttccacgcatttacgcgtgtctttggagtgggggtgaagacagcagacaagtggtaccgtatgggtctgcgcaccctcgaggatgttcgttccagcaagaccctgaagttgaccccgtggcagaaagtaggtctgctgtattatgaagatcttaggcgcggcgttacgcgtgccgaagctgacgcgatttggctgctggttcaggatgcagtcgcaactttcgacccggatgcgatcgtggagattgtcggtggacagcgtcgtgggaaacctcagggtcacgacgttgatctgcttatcagttctccgggagctgaaaaagagcaagaagaccaactcctgcagaaagtgatgaatctgtggaagaaacaagggttgttgctgtgtggtcgtctggaatggagtcagtgggaatgggggggttcgccttccggtaaggctgatgagggtgacgcggaggcgtcgtgctttctgatcctcaaactttatgatcatctggtgcgtaaaagtaaacgcaatatgccgactggttcgaacatgggcgagtccaaaccgtggaaagcaattaaagtagatctgctgcgttgcccccgcggcagttttgcgtttgcgatgttgcagtggaccggaagccgcatgttccgtcgtgatctgcgctggtacgccctggaagagaagaacatgatgctggacaatcattcgctgtatgacatgactcgtggtatccaactccctgctaaatcggaagaggaaattttcgaacatctggggcttgaatacctggaaccgttcgaacgtaacgca

SEQ ID NO: 4728 - protein, 528 aa, synthetic construct
  REGION 1..528: note = Variant of terminal deoxynucleotidyltransferase
MHHHHHGGSGSHGIRTIDSDFGKKQQKKGDNHDSSATYEIKFHEFVLFILEEKMGATRRTFLTDLARKKGFRVENELTDEVTHIVAENLSRSEVLAWLKEHKMEKTKQFELLDISWLIESMKVGKPVDTKGKYQLAESVEVSANPDPTEGRVNELPPTMKTVSPYACQRRTTLNNRNQRFTDSLEILRENYELKGNDDTALEFRRAISVLKSLPFEVRSLKDTEGLPWISDEVKGIMEEIIEVGESREVQAVLNDEWYQSFHAFTRVFGVGVKTADKWYRMGLRTLEDVRSSKTLKLTPWQKVGLLYYEDLRRGVTRAEADAIWLLVQDAVATFDPDAIVEIVGGQRRGKPQGHDVDLLISSPGAEKEQEDQLLQKVMNLWKKQGLLLCGRLEWSQWEWGGSPSGKADEGDAEASCFLILKLYDHLVRKSKRNMPTGSNMGESKPWKAIKVDLLRCPRGSFAFAMLQWTGSRMFRRDLRWYALEEKNMMLDNHSLYDMTRGIQLPAKSEEEIFEHLGLEYLEPFERNA

SEQ ID NO: 4729 - DNA, 1584 bp, synthetic construct
  misc_feature 1..1584: note = Variant of terminal deoxynucleotidyltransferase
  source 1..1584: mol_type = other DNA
atgcaccatcatcatcatggcggtagcggcagccacggcattcgtaccatcgattcggacttcgggaagaaacagcagaaaaaaggcgataaccacgatagttccgccacttatgaaatcaaatttcacgagtttgtgctgttcattctcgaagaaaaaatgggtgcgacgcgtcgtacttttctgacagatttagcccgcaagaaagggttccgcgtcgagaatgaactgaccgacgaagttacccacatcgtggcagaaaatctgtcacgctctgaagtattggcttggctgaaagaacacaagatggagaagaccaagcaattcgaactgctggatattagctggcttatcgaaagcatgaaagttggtaaaccggtggacaccaaggggaaataccagttggcggaatcggttgaggtgagtgcgaacccagatccgacagaaggtcgtgtaaacgagctgcctcctactatgaaaaccgtttctccgtatgcgtgtcaacgccgcaccaccctgaacaaccgtaatcaacgttttacggactcgctggagattcttcgtgaaaattacgagctgaaaggcaacgacgatactgcgctggaatttcgtcgtgctatctccgtgctgaaaagccttccgtttgaggtacgtagcctgaaagacacggaaggattgccctggatcagtgatgaagtcaaagggattatggaagaaatcatcgaagtcggggagtcgcgtgaagtgcaggccgtgctcaatgatgagtggtatcaaagcttccacgcatttacgcgtgtctttggagtgggggtgaagacagcagacaagtggtaccgtatgggtctgcgcaccctcgaggatgttcgttccagcaagaccctgaagttgaccccgtggcagaaagtaggtctgctgtattatgaagatcttgctcgcggcgttacgcgtgccgaagctgacgcgatttggctgctggttcaggatgcagtcgcaactttcgacccggatgcgatcgtggagattgtcggtggacagcgtcgtgggaaacctcagggtcacgacgttgatctgcttatcagttctccgggagctgaaaaagagcaagaagaccaactcctgcagaaagtgatgaatctgtggaagaaacaagggttgttgctgtgtggtcgtctggaatggagtcagtgggaatgggggggttcgccttccggtaaggctgatgagggtgacgcggaggcgtcgtgctttctgatcctcaaactttatgatcatctggtgcgtaaaagtaaacgcaatatgccgactggttcgaacatgggcgagtccaaaccgtggaaagcaattaaagtagatctgctgcgttgcccccgcggcagttttgcgtttgcgatgttgcagtggaccggaagccgcatgttccgtcgtgatctgcgctggtacgccctggaagagaagaacatgatgctggacaatcatacgctgtatgacatgactcgtggtatccaactccctgctaaatcggaagaggaaattttcgaacatctggggcttgaatacctggaaccgttcgaacgtaacgca

SEQ ID NO: 4730 - protein, 528 aa, synthetic construct
  REGION 1..528: note = Variant of terminal deoxynucleotidyltransferase
MHHHHHGGSGSHGIRTIDSDFGKKQQKKGDNHDSSATYEIKFHEFVLFILEEKMGATRRTFLTDLARKKGFRVENELTDEVTHIVAENLSRSEVLAWLKEHKMEKTKQFELLDISWLIESMKVGKPVDTKGKYQLAESVEVSANPDPTEGRVNELPPTMKTVSPYACQRRTTLNNRNQRFTDSLEILRENYELKGNDDTALEFRRAISVLKSLPFEVRSLKDTEGLPWISDEVKGIMEEIIEVGESREVQAVLNDEWYQSFHAFTRVFGVGVKTADKWYRMGLRTLEDVRSSKTLKLTPWQKVGLLYYEDLARGVTRAEADAIWLLVQDAVATFDPDAIVEIVGGQRRGKPQGHDVDLLISSPGAEKEQEDQLLQKVMNLWKKQGLLLCGRLEWSQWEWGGSPSGKADEGDAEASCFLILKLYDHLVRKSKRNMPTGSNMGESKPWKAIKVDLLRCPRGSFAFAMLQWTGSRMFRRDLRWYALEEKNMMLDNHTLYDMTRGIQLPAKSEEEIFEHLGLEYLEPFERNA

SEQ ID NO: 4731 - DNA, 1584 bp, synthetic construct
  misc_feature 1..1584: note = Variant of terminal deoxynucleotidyltransferase
  source 1..1584: mol_type = other DNA
atgcaccatcatcatcatggcggtagcggcagccacggcattcgtaccatcgattcggacttcgggaagaaacagcagaaaaaaggcgataaccacgatagttccgccacttatgaaatcaaatttcacgagtttgtgctgttcattctcgaagaaaaaatgggtgcgacgcgtcgtacttttctgacagatttagcccgcaagaaagggttccgcgtcgagaatgaactgaccgacgaagttacccacatcgtggcagaaaatctgtcacgctctgaagtattggcttggctgaaagaacacaagatggagaagaccaagcaattcgaactgctggatattagctggcttatcgaaagcatgaaagttggtaaaccggtggacaccaaggggaaataccagttggcggaatcggttgaggtgagtgcgaacccagatccgacagaaggtcgtgtaaacgagctgcctcctactatgaaaaccgtttctccgtatgcgtgtcaacgccgcaccaccctgaacaaccgtaatcaacgttttacggactcgctggagattcttcgtgaaaattacgagctgaaaggcaacgacgatactgcgctggaatttcgtcgtgctatctccgtgctgaaaagccttccgtttgaggtacgtagcctgaaagacacggaaggattgccctggatcagtgatgaagtcaaagggattatggaagaaatcatcgaagtcggggagtcgcgtgaagtgcaggccgtgctcaatgatgagtggtatcaaagcttccacgcatttacgcgtgtctttggagtgggggtgaagacagcagacaagtggtaccgtatgggtctgcgcaccctcgaggatgttcgttccagcaagaccctgaagttgaccccgtggcagaaagtaggtctgctgtattatgaagatcttgctcgcggcgttacgcgtgccgaagctgacgcgatttggctgctggttcaggatgcagtcgcaactttcgacccggatgcgatcgtggagattgtcggtggacagcgtcgtgggaaacctcagggtcacgacgttgatctgcttatcagttctccgggagctgaaaaagagcaagaagaccaactcctgcagaaagtgatgaatctgtggaagaaacaagggttgttgctgtgtggtcgtctggaatggagtcagtgggaatgggggggttcgccttccggtaaggctgatgagggtgacgcggaggcgtcgtgctttctgatcctcaaactttatgatcatctggtgcgtaaaagtaaacgcaatatgccgactggttcgaacatgggcgagtccaaaccgtggaaagcaattaaagtagatctgctgcgttgcccccgcggcagttttgcgtttgcgatgttgcagtggaccggaagccgcatgttccgtcttgatctgcgcgattacgccctggaagagaagaacatgatgctggacaatcattcgctgtatgacatgactcgtggtatccaactccctgctaaatcggaagaggaaattttcgaacatctggggcttgaatacctggaaccgttcgaacgtaacgca

SEQ ID NO: 4732 - protein, 528 aa, synthetic construct
  REGION 1..528: note = Variant of terminal deoxynucleotidyltransferase
MHHHHHGGSGSHGIRTIDSDFGKKQQKKGDNHDSSATYEIKFHEFVLFILEEKMGATRRTFLTDLARKKGFRVENELTDEVTHIVAENLSRSEVLAWLKEHKMEKTKQFELLDISWLIESMKVGKPVDTKGKYQLAESVEVSANPDPTEGRVNELPPTMKTVSPYACQRRTTLNNRNQRFTDSLEILRENYELKGNDDTALEFRRAISVLKSLPFEVRSLKDTEGLPWISDEVKGIMEEIIEVGESREVQAVLNDEWYQSFHAFTRVFGVGVKTADKWYRMGLRTLEDVRSSKTLKLTPWQKVGLLYYEDLARGVTRAEADAIWLLVQDAVATFDPDAIVEIVGGQRRGKPQGHDVDLLISSPGAEKEQEDQLLQKVMNLWKKQGLLLCGRLEWSQWEWGGSPSGKADEGDAEASCFLILKLYDHLVRKSKRNMPTGSNMGESKPWKAIKVDLLRCPRGSFAFAMLQWTGSRMFRLDLRDYALEEKNMMLDNHSLYDMTRGIQLPAKSEEEIFEHLGLEYLEPFERNA

SEQ ID NO: 4733 - DNA, 1584 bp, synthetic construct
  misc_feature 1..1584: note = Variant of terminal deoxynucleotidyltransferase
  source 1..1584: mol_type = other DNA
atgcaccatcatcatcatggcggtagcggcagccacggcattcgtaccatcgattcggacttcgggaagaaacagcagaaaaaaggcgataaccacgatagttccgccacttatgaaatcaaatttcacgagtttgtgctgttcattctcgaagaaaaaatgggtgcgacgcgtcgtacttttctgacagatttagcccgcaagaaagggttccgcgtcgagaatgaactgaccgacgaagttacccacatcgtggcagaaaatctgtcacgctctgaagtattggcttggctgaaagaacacaagatggagaagaccaagcaattcgaactgctggatattagctggcttatcgaaagcatgaaagttggtaaaccggtggacaccaaggggaaataccagttggcggaatcggttgaggtgagtgcgaacccagatccgacagaaggtcgtgtaaacgagctgcctcctactatgaaaaccgtttctccgtatgcgtgtcaacgccgcaccaccctgaacaaccgtaatcaacgttttacggactcgctggagattcttcgtgaaaattacgagctgaaaggcaacgacgatactgcgctggaatttcgtcgtgctatctccgtgctgaaaagccttccgtttgaggtacgtagcctgaaagacacggaaggattgccctggatcagtgatgaagtcaaagggattatggaagaaatcatcgaagtcggggagtcgcgtgaagtgcaggccgtgctcaatgatgagtggtatcaaagcttccacgcatttacgcgtgtctttggagtgggggtgaagacagcagacaagtggtaccgtatgggtctgcgcaccctcgaggatgttcgttccagcaagaccctgaagttgaccccgtggcagaaagtaggtctgctgtattatgaagatcttgctcgcggcgttacgcgtgccgaagctgacgcgatttggctgctggttcaggatgcagtcgcaactttcgacccggatgcgatcgtggagattgtcggtggacagcgtcgtgggaaacctcagggtcacgacgttgatctgcttatcagttctccgggagctgaaaaagagcaagaagaccaactcctgcagaaagtgatgaatctgtggaagaaacaagggttgttgctgtgtggtcgtctggaatggagtcagtgggaatgggggggttcgccttccggtaaggctgatgagggtgacgcggaggcgtcgtgctttctgatcctcaaactttatgatcatctggtgcgtaaaagtaaacgcaatatgccgactggttcgaacatgggcgagtccaaaccgtggaaagcaattaaagtagatctgctgcgttgcccccgcggcagttttgcgtttgcgatgttgcagtggaccggaagccgcatgttccgtcgtgatctgcgctggtacgccctggaagagaagaacatgatgctggacaatcataggctgtatgacatgactcgtggtatccaactccctgctaaatcggaagaggaaattttcgaacatctggggcttgaatacctggaaccgttcgaacgtaacgca

SEQ ID NO: 4734 - protein, 528 aa, synthetic construct
  REGION 1..528: note = Variant of terminal deoxynucleotidyltransferase
MHHHHHGGSGSHGIRTIDSDFGKKQQKKGDNHDSSATYEIKFHEFVLFILEEKMGATRRTFLTDLARKKGFRVENELTDEVTHIVAENLSRSEVLAWLKEHKMEKTKQFELLDISWLIESMKVGKPVDTKGKYQLAESVEVSANPDPTEGRVNELPPTMKTVSPYACQRRTTLNNRNQRFTDSLEILRENYELKGNDDTALEFRRAISVLKSLPFEVRSLKDTEGLPWISDEVKGIMEEIIEVGESREVQAVLNDEWYQSFHAFTRVFGVGVKTADKWYRMGLRTLEDVRSSKTLKLTPWQKVGLLYYEDLARGVTRAEADAIWLLVQDAVATFDPDAIVEIVGGQRRGKPQGHDVDLLISSPGAEKEQEDQLLQKVMNLWKKQGLLLCGRLEWSQWEWGGSPSGKADEGDAEASCFLILKLYDHLVRKSKRNMPTGSNMGESKPWKAIKVDLLRCPRGSFAFAMLQWTGSRMFRRDLRWYALEEKNMMLDNHRLYDMTRGIQLPAKSEEEIFEHLGLEYLEPFERNA

SEQ ID NO: 4735 - DNA, 1584 bp, synthetic construct
  misc_feature 1..1584: note = Variant of terminal deoxynucleotidyltransferase
  source 1..1584: mol_type = other DNA
atgcaccatcatcatcatggcggtagcggcagccacggcattcgtaccatcgattcggacttcgggaagaaacagcagaaaaaaggcgataaccacgatagttccgccacttatgaaatcaaatttcacgagtttgtgctgttcattctcgaagaaaaaatgggtgcgacgcgtcgtacttttctgacagatttagcccgcaagaaagggttccgcgtcgagaatgaactgaccgacgaagttacccacatcgtggcagaaaatctgtcacgctctgaagtattggcttggctgaaagaacacaagatggagaagaccaagcaattcgaactgctggatattagctggcttatcgaaagcatgaaagttggtaaaccggtggacaccaaggggaaataccagttggcggaatcggttgaggtgagtgcgaacccagatccgacagaaggtcgtgtaaacgagctgcctcctactatgaaaaccgtttctccgtatgcgtgtcaacgccgcaccaccctgaacaaccgtaatcaacgttttacggactcgctggagattcttcgtgaaaattacgagctgaaaggcaacgacgatactgcgctggaatttcgtcgtgctatctccgtgctgaaaagccttccgtttgaggtacgtagcctgaaagacacggaaggattgccctggatcagtgatgaagtcaaagggattatggaagaaatcatcgaagtcggggagtcgcgtgaagtgcaggccgtgctcaatgatgagtggtatcaaagcttccacgcatttacgcgtgtctttggagtgggggtgaagacagcagacaagtggtaccgtatgggtctgcgcaccctcgaggatgttcgttccagcaagaccctgaagttgaccccgtggcagaaagtaggtctgctgtattatgaagatcttgctcgcggcgttacgcgttatgaagctgacgcgatttggctgctggttcaggatgcagtcgcaactttcgacccggatgcgatcgtggagattgtcggtggacagcgtcgtgggaaacctcagggtcacgacgttgatctgcttatcagttctccgggagctgaaaaagagcaagaagaccaactcctgcagaaagtgatgaatctgtggaagaaacaagggttgttgctgtgtggtcgtctggaatggagtcagtgggaatgggggggttcgccttccggtaaggctgatgagggtgacgcggaggcgtcgtgctttctgatcctcaaactttatgatcatctggtgcgtaaaagtaaacgcaatatgccgactggttcgaacatgggcgagtccaaaccgtggaaagcaattaaagtagatctgctgcgttgcccccgcggcagttttgcgtttgcgatgttgcagtggaccggaagccgcatgttccgtcgtgatctgcgctggtacgccctggaagagaagaacatgatgctggacaatcattcgctgtatgacatgactcgtggtatccaactccctgctaaatcggaagaggaaattttcgaacatctggggcttgaatacctggaaccgttcgaacgtaacgca

SEQ ID NO: 4736 - protein, 528 aa, synthetic construct
  REGION 1..528: note = Variant of terminal deoxynucleotidyltransferase
MHHHHHGGSGSHGIRTIDSDFGKKQQKKGDNHDSSATYEIKFHEFVLFILEEKMGATRRTFLTDLARKKGFRVENELTDEVTHIVAENLSRSEVLAWLKEHKMEKTKQFELLDISWLIESMKVGKPVDTKGKYQLAESVEVSANPDPTEGRVNELPPTMKTVSPYACQRRTTLNNRNQRFTDSLEILRENYELKGNDDTALEFRRAISVLKSLPFEVRSLKDTEGLPWISDEVKGIMEEIIEVGESREVQAVLNDEWYQSFHAFTRVFGVGVKTADKWYRMGLRTLEDVRSSKTLKLTPWQKVGLLYYEDLARGVTRYEADAIWLLVQDAVATFDPDAIVEIVGGQRRGKPQGHDVDLLISSPGAEKEQEDQLLQKVMNLWKKQGLLLCGRLEWSQWEWGGSPSGKADEGDAEASCFLILKLYDHLVRKSKRNMPTGSNMGESKPWKAIKVDLLRCPRGSFAFAMLQWTGSRMFRRDLRWYALEEKNMMLDNHSLYDMTRGIQLPAKSEEEIFEHLGLEYLEPFERNA

SEQ ID NO: 4737 - DNA, 1584 bp, synthetic construct
  misc_feature 1..1584: note = Variant of terminal deoxynucleotidyltransferase
  source 1..1584: mol_type = other DNA
atgcaccatcatcatcatggcggtagcggcagccacggcattcgtaccatcgattcggacttcgggaagaaacagcagaaaaaaggcgataaccacgatagttccgccacttatgaaatcaaatttcacgagtttgtgctgttcattctcgaagaaaaaatgggtgcgacgcgtcgtacttttctgacagatttagcccgcaagaaagggttccgcgtcgagaatgaactgaccgacgaagttacccacatcgtggcagaaaatctgtcacgctctgaagtattggcttggctgaaagaacacaagatggagaagaccaagcaattcgaactgctggatattagctggcttatcgaaagcatgaaagttggtaaaccggtggacaccaaggggaaataccagttggcggaatcggttgaggtgagtgcgaacccagatccgacagaaggtcgtgtaaacgagctgcctcctactatgaaaaccgtttctccgtatgcgtgtcaacgccgcaccaccctgaacaaccgtaatcaacgttttacggactcgctggagattcttcgtgaaaattacgagctgaaaggcaacgacgatactgcgctggaatttcgtcgtgctatctccgtgctgaaaagccttccgtttgaggtacgtagcctgaaagacacggaaggattgccctggatcagtgatgaagtcaaagggattatggaagaaatcatcgaagtcggggagtcgcgtgaagtgcaggccgtgctcaatgatgagtggtatcaaagcttccacgcatttacgcgtgtctttggagtgggggtgaagacagcagacaagtggtaccgtatgggtctgcgcaccctcgaggatgttcgttccagcaagaccctgaagttgaccccgtggcagaaagtaggtctgctgtattatgaagatcttgctcgcggcgttacgcgtgccgaagctgacgcgatttggctgctggttcaggatgcagtcgcaactttcgacccggatgcgatcgtggagattgtcggtggacagcgtcgtgggaaacctcagggtcacgacgttgatctgcttatcagttctccgggagctgaaaaagagcaagaagaccaactcctgcagaaagtgatgaatctgtggaagaaacaagggttgttgctgtgtggtcgtctggaatggagtcagtgggaatgggggggttcgccttccggtaaggctgatgagggtgacgcggaggcgtcgtgctttctgatcctcaaactttatgatcatctggtgcgtaaaagtaaacgcaatatgccgactggttcgaacatgggcgagtccaaaccgtggaaagcaattaaagtagatctgctgcgttgcccccgcggcagttttgcgtttgcgatgttgcagtggaccggaagccgcatgttccgtcgtgatctgcgctggtacgccctggaagagaagaacatgatgctggacaatcattcgctgtatgacatgactcgtggtatccaactccctgctaaatcggaagaggaaattttcgaacatctggggcttgaatacctgacgccgttcgaacgtaacgca

SEQ ID NO: 4738 - protein, 528 aa, synthetic construct
  REGION 1..528: note = Variant of terminal deoxynucleotidyltransferase
MHHHHHGGSGSHGIRTIDSDFGKKQQKKGDNHDSSATYEIKFHEFVLFILEEKMGATRRTFLTDLARKKGFRVENELTDEVTHIVAENLSRSEVLAWLKEHKMEKTKQFELLDISWLIESMKVGKPVDTKGKYQLAESVEVSANPDPTEGRVNELPPTMKTVSPYACQRRTTLNNRNQRFTDSLEILRENYELKGNDDTALEFRRAISVLKSLPFEVRSLKDTEGLPWISDEVKGIMEEIIEVGESREVQAVLNDEWYQSFHAFTRVFGVGVKTADKWYRMGLRTLEDVRSSKTLKLTPWQKVGLLYYEDLARGVTRAEADAIWLLVQDAVATFDPDAIVEIVGGQRRGKPQGHDVDLLISSPGAEKEQEDQLLQKVMNLWKKQGLLLCGRLEWSQWEWGGSPSGKADEGDAEASCFLILKLYDHLVRKSKRNMPTGSNMGESKPWKAIKVDLLRCPRGSFAFAMLQWTGSRMFRRDLRWYALEEKNMMLDNHSLYDMTRGIQLPAKSEEEIFEHLGLEYLTPFERNA

SEQ ID NO: 4739 - DNA, 1584 bp, synthetic construct
  misc_feature 1..1584: note = Variant of terminal deoxynucleotidyltransferase
  source 1..1584: mol_type = other DNA
atgcaccatcatcatcatggcggtagcggcagccacggcattcgtaccatcgattcggacttcgggaagaaacagcagaaaaaaggcgataaccacgatagttccgccacttatgaaatcaaatttcacgagtttgtgctgttcattctcgaagaaaaaatgggtgcgacgcgtcgtacttttctgacagatttagcccgcaagaaagggttccgcgtcgagaatgaactgaccgacgaagttacccacatcgtggcagaaaatctgtcacgctctgaagtattggcttggctgaaagaacacaagatggagaagaccaagcaattcgaactgctggatattagctggcttatcgaaagcatgaaagttggtaaaccggtggacaccaaggggaaataccagttggcggaatcggttgaggtgagtgcgaacccagatccgacagaaggtcgtgtaaacgagctgcctcctactatgaaaaccgtttctccgtatgcgtgtcaacgccgcaccaccctgaacaaccgtaatcaacgttttacggactcgctggagattcttcgtgaaatgtacgagcttaaaggcaacgacgatactgcgctggaatttcgtcgtgctatctccgtgctgaaaagccttccgtttgaggtacgtagcctgaaagacacggaaggattgccctggatcagtgatgaagtcaaagggattatggaagaaatcatcgaagtcggggagtcgcgtgaagtgcaggccgtgctcaatgatgagtggtatcaaagcttccacgcatttacgcgtgtctttggagtgggggtgaagacagcagacaagtggtaccgtatgggtctgcgcaccctcgaggatgttcgttccagcaagaccctgaagttgaccccgtggcagaaagtaggtctgctgtattatgaagatcttgctcgcggcgttacgcgtgccgaagctgacgcgatttggctgctggttcaggatgcagtcgcaactttcgacccggatgcgatcgtggagattgtcggtggacagcgtcgtgggaaacctcagggtcacgacgttgatctgcttatcagttctccgggagctgaaaaagagcaagaagaccaactcctgcagaaagtgatgaatctgtggaagaaacaagggttgttgctgtgtggtcgtctggaatggagtcagtgggaatgggggggttcgccttccggtaaggctgatgagggtgacgcggaggcgtcgtgctttctgatcctcaaactttatgatcatctggtgcgtaaaagtaaacgcaatatgccgactggttcgaacatgggcgagtccaaaccgtggaaagcaattaaagtagatctgctgcgttgcccccgcggcagttttgcgtttgcgatgttgcagtggaccggaagccgcatgttccgtcgtgatctgcgctggtacgccctggaagagaagaacatgatgctggacaatcattcgctgtatgacatgactcgtggtatccaactccctgctaaatcggaagaggaaattttcgaacatctggggcttgaatacctggaaccgttcgaacgtaacgca

SEQ ID NO: 4740 - protein, 528 aa, synthetic construct
  REGION 1..528: note = Variant of terminal deoxynucleotidyltransferase
MHHHHHGGSGSHGIRTIDSDFGKKQQKKGDNHDSSATYEIKFHEFVLFILEEKMGATRRTFLTDLARKKGFRVENELTDEVTHIVAENLSRSEVLAWLKEHKMEKTKQFELLDISWLIESMKVGKPVDTKGKYQLAESVEVSANPDPTEGRVNELPPTMKTVSPYACQRRTTLNNRNQRFTDSLEILREMYELKGNDDTALEFRRAISVLKSLPFEVRSLKDTEGLPWISDEVKGIMEEIIEVGESREVQAVLNDEWYQSFHAFTRVFGVGVKTADKWYRMGLRTLEDVRSSKTLKLTPWQKVGLLYYEDLARGVTRAEADAIWLLVQDAVATFDPDAIVEIVGGQRRGKPQGHDVDLLISSPGAEKEQEDQLLQKVMNLWKKQGLLLCGRLEWSQWEWGGSPSGKADEGDAEASCFLILKLYDHLVRKSKRNMPTGSNMGESKPWKAIKVDLLRCPRGSFAFAMLQWTGSRMFRRDLRWYALEEKNMMLDNHSLYDMTRGIQLPAKSEEEIFEHLGLEYLEPFERNA

SEQ ID NO: 4741 - DNA, 1584 bp, synthetic construct
  misc_feature 1..1584: note = Variant of terminal deoxynucleotidyltransferase
  source 1..1584: mol_type = other DNA
atgcaccatcatcatcatggcggtagcggcagccacggcattcgtaccatcgattcggacttcgggaagaaacagcagaaaaaaggcgataaccacgatagttccgccacttatgaaatcaaatttcacgagtttgtgctgttcattctcgaagaaaaaatgggtgcgacgcgtcgtacttttctgacagatttagcccgcaagaaagggttccgcgtcgagaatgaactgaccgacgaagttacccacatcgtggcagaaaatctgtcacgctctgaagtattggcttggctgaaagaacacaagatggagaagaccaagcaattcgaactgctggatattagctggcttatcgaaagcatgaaagttggtaaaccggtggacaccaaggggaaataccagttggcggaatcggttgaggtgagtgcgaacccagatccgacagaaggtcgtgtaaacgagctgcctcctactatgaaaaccgtttctccgtatgcgtgtcaacgccgcaccaccctgaacaaccgtaatcaacgttttacggactcgctggagattcttcgtgaaaattacgagctgaaaggcaacgacgatactgcgctggaatttcgtcgtgctatctccgtgctgaaaagccttccgtttgaggtacgtagcctgaaagacacggaaggattgccctggatcagtgatgaagtcaaagggattatggaagaaatcatcgaagtcggggagtcgcgtgaagtgcaggccgtgctcaatgatgagtggtatcaaagcttccacgcatttacgcgtgtctttggagtgggggtgaagacagcagacaagtggtaccgtatgggtctgcgcaccctcgaggatgttcgttccagcaagaccctgaagttgaccccgtggcagaaagtaggtctgctgtattatgaagatcttgctcgcggcgttacgcgtctggaagctgacgcgatttggctgctggttcaggatgcagtcgcaactttcgacccggatgcgatcgtggagattgtcggtggacagcgtcgtgggaaacctcagggtcacgacgttgatctgcttatcagttctccgggagctgaaaaagagcaagaagaccaactcctgcagaaagtgatgaatctgtggaagaaacaagggttgttgctgtgtggtcgtctggaatggagtcagtgggaatgggggggttcgccttccggtaaggctgatgagggtgacgcggaggcgtcgtgctttctgatcctcaaactttatgatcatctggtgcgtaaaagtaaacgcaatatgccgactggttcgaacatgggcgagtccaaaccgtggaaagcaattaaagtagatctgctgcgttgcccccgcggcagttttgcgtttgcgatgttgcagtggaccggaagccgcatgttccgtcgtgatctgcgctggtacgccctggaagagaagaacatgatgctggacaatcattcgctgtatgacatgactcgtggtatccaactccctgctaaatcggaagaggaaattttcgaacatctggggcttgaatacctggaaccgttcgaacgtaacgca

SEQ ID NO: 4742 - protein, 528 aa, synthetic construct
  REGION 1..528: note = Variant of terminal deoxynucleotidyltransferase
MHHHHHGGSGSHGIRTIDSDFGKKQQKKGDNHDSSATYEIKFHEFVLFILEEKMGATRRTFLTDLARKKGFRVENELTDEVTHIVAENLSRSEVLAWLKEHKMEKTKQFELLDISWLIESMKVGKPVDTKGKYQLAESVEVSANPDPTEGRVNELPPTMKTVSPYACQRRTTLNNRNQRFTDSLEILRENYELKGNDDTALEFRRAISVLKSLPFEVRSLKDTEGLPWISDEVKGIMEEIIEVGESREVQAVLNDEWYQSFHAFTRVFGVGVKTADKWYRMGLRTLEDVRSSKTLKLTPWQKVGLLYYEDLARGVTRLEADAIWLLVQDAVATFDPDAIVEIVGGQRRGKPQGHDVDLLISSPGAEKEQEDQLLQKVMNLWKKQGLLLCGRLEWSQWEWGGSPSGKADEGDAEASCFLILKLYDHLVRKSKRNMPTGSNMGESKPWKAIKVDLLRCPRGSFAFAMLQWTGSRMFRRDLRWYALEEKNMMLDNHSLYDMTRGIQLPAKSEEEIFEHLGLEYLEPFERNA

SEQ ID NO: 4743 - DNA, 1584 bp, synthetic construct
  misc_feature 1..1584: note = Variant of terminal deoxynucleotidyltransferase
  source 1..1584: mol_type = other DNA
atgcaccatcatcatcatggcggtagcggcagccacggcattcgtaccatcgattcggacttcgggaagaaacagcagaaaaaaggcgataaccacgatagttccgccacttatgaaatcaaatttcacgagtttgtgctgttcattctcgaagaaaaaatgggtgcgacgcgtcgtacttttctgacagatttagcccgcaagaaagggttccgcgtcgagaatgaactgaccgacgaagttacccacatcgtggcagaaaatctgtcacgctctgaagtattggcttggctgaaagaacacaagatggagaagaccaagcaattcgaactgctggatattagctggcttatcgaaagcatgaaagttggtaaaccggtggacaccaaggggaaataccagttggcggaatcggttgaggtgagtgcgaacccagatccgacagaaggtcgtgtaaacgagctgcctcctactatgaaaaccgtttctccgtatgcgtgtcaacgccgcaccaccctgaacaaccgtaatcaacgttttacggactcgctggagattcttcgtgctatgtacgagctgaaaggcaacgacgatactgcgctggaatttcgtcgtgctatctccgtgctgaaaagccttccgtttgaggtacgtagcctgaaagacacggaaggattgccctggatcagtgatgaagtcaaagggattatggaagaaatcatcgaagtcggggagtcgcgtgaagtgcaggccgtgctcaatgatgagtggtatcaaagcttccacgcatttacgcgtgtctttggagtgggggtgaagacagcagacaagtggtaccgtatgggtctgcgcaccctcgaggatgttcgttccagcaagaccctgaagttgaccccgtggcagaaagtaggtctgctgtattatgaagatcttgctcgcggcgttacgcgtgccgaagctgacgcgatttggctgctggttcaggatgcagtcgcaactttcgacccggatgcgatcgtggagattgtcggtggacagcgtcgtgggaaacctcagggtcacgacgttgatctgcttatcagttctccgggagctgaaaaagagcaagaagaccaactcctgcagaaagtgatgaatctgtggaagaaacaagggttgttgctgtgtggtcgtctggaatggagtcagtgggaatgggggggttcgccttccggtaaggctgatgagggtgacgcggaggcgtcgtgctttctgatcctcaaactttatgatcatctggtgcgtaaaagtaaacgcaatatgccgactggttcgaacatgggcgagtccaaaccgtggaaagcaattaaagtagatctgctgcgttgcccccgcggcagttttgcgtttgcgatgttgcagtggaccggaagccgcatgttccgtcgtgatctgcgctggtacgccctggaagagaagaacatgatgctggacaatcattcgctgtatgacatgactcgtggtatccaactccctgctaaatcggaagaggaaattttcgaacatctggggcttgaatacctggaaccgttcgaacgtaacgca

SEQ ID NO: 4744 - protein, 528 aa, synthetic construct
  REGION 1..528: note = Variant of terminal deoxynucleotidyltransferase
MHHHHHGGSGSHGIRTIDSDFGKKQQKKGDNHDSSATYEIKFHEFVLFILEEKMGATRRTFLTDLARKKGFRVENELTDEVTHIVAENLSRSEVLAWLKEHKMEKTKQFELLDISWLIESMKVGKPVDTKGKYQLAESVEVSANPDPTEGRVNELPPTMKTVSPYACQRRTTLNNRNQRFTDSLEILRAMYELKGNDDTALEFRRAISVLKSLPFEVRSLKDTEGLPWISDEVKGIMEEIIEVGESREVQAVLNDEWYQSFHAFTRVFGVGVKTADKWYRMGLRTLEDVRSSKTLKLTPWQKVGLLYYEDLARGVTRAEADAIWLLVQDAVATFDPDAIVEIVGGQRRGKPQGHDVDLLISSPGAEKEQEDQLLQKVMNLWKKQGLLLCGRLEWSQWEWGGSPSGKADEGDAEASCFLILKLYDHLVRKSKRNMPTGSNMGESKPWKAIKVDLLRCPRGSFAFAMLQWTGSRMFRRDLRWYALEEKNMMLDNHSLYDMTRGIQLPAKSEEEIFEHLGLEYLEPFERNA

SEQ ID NO: 4745 - DNA, 1584 bp, synthetic construct
  misc_feature 1..1584: note = Variant of terminal deoxynucleotidyltransferase
  source 1..1584: mol_type = other DNA
atgcaccatcatcatcatggcggtagcggcagccacggcattcgtaccatcgattcggacttcgggaagaaacagcagaaaaaaggcgataaccacgatagttccgccacttatgaaatcaaatttcacgagtttgtgctgttcattctcgaagaaaaaatgggtgcgacgcgtcgtacttttctgacagatttagcccgcaagaaagggttccgcgtcgagaatgaactgaccgacgaagttacccacatcgtggcagaaaatctgtcacgctctgaagtattggcttggctgaaagaacacaagatggagaagaccaagcaattcgaactgctggatattagctggcttatcgaaagcatgaaagttggtaaaccggtggacaccaaggggaaataccagttggcggaatcggttgaggtgagtgcgaacccagatccgacagaaggtcgtgtaaacgagctgcctcctactatgaaaaccgtttctccgtatgcgtgtcaacgccgcaccaccctgaacaaccgtaatcaacgttttacggactcgctggagattcttcgtgaaaattacgagctgaaaggcaacgacgatactgcgctggaatttcgtcgtgctatctccgtgctgaaaagccttccgtttgaggtacgtagcctgaaagacacggaaggattgccctggatcagtgatgaagtcaaagggattatggaagaaatcatcgaagtcggggagtcgcgtgaagtgcaggccgtgctcaatgatgagtggtatcaaagcttccacgcatttacgcgtgtctttggagtgggggtgaagacagcagacaagtggtaccgtatgggtctgcgcaccctcgaggatgttcgttccagcaagaccctgaagttgaccccgtggcagaaagtaggtctgctgtattatgaagatcttcatcgcggcgttacgcgtgccgaagctgacgcgatttggctgctggttcaggatgcagtcgcaactttcgacccggatgcgatcgtggagattgtcggtggacagcgtcgtgggaaacctcagggtcacgacgttgatctgcttatcagttctccgggagctgaaaaagagcaagaagaccaactcctgcagaaagtgatgaatctgtggaagaaacaagggttgttgctgtgtggtcgtctggaatggagtcagtgggaatgggggggttcgccttccggtaaggctgatgagggtgacgcggaggcgtcgtgctttctgatcctcaaactttatgatcatctggtgcgtaaaagtaaacgcaatatgccgactggttcgaacatgggcgagtccaaaccgtggaaagcaattaaagtagatctgctgcgttgcccccgcggcagttttgcgtttgcgatgttgcagtggaccggaagccgcatgttccgtcgtgatctgcgctggtacgccctggaagagaagaacatgatgctggacaatcattcgctgtatgacatgactcgtggtatccaactccctgctaaatcggaagaggaaattttcgaacatctggggcttgaatacctggaaccgttcgaacgtaacgca

SEQ ID NO: 4746 - protein, 528 aa, synthetic construct
  REGION 1..528: note = Variant of terminal deoxynucleotidyltransferase
MHHHHHGGSGSHGIRTIDSDFGKKQQKKGDNHDSSATYEIKFHEFVLFILEEKMGATRRTFLTDLARKKGFRVENELTDEVTHIVAENLSRSEVLAWLKEHKMEKTKQFELLDISWLIESMKVGKPVDTKGKYQLAESVEVSANPDPTEGRVNELPPTMKTVSPYACQRRTTLNNRNQRFTDSLEILRENYELKGNDDTALEFRRAISVLKSLPFEVRSLKDTEGLPWISDEVKGIMEEIIEVGESREVQAVLNDEWYQSFHAFTRVFGVGVKTADKWYRMGLRTLEDVRSSKTLKLTPWQKVGLLYYEDLHRGVTRAEADAIWLLVQDAVATFDPDAIVEIVGGQRRGKPQGHDVDLLISSPGAEKEQEDQLLQKVMNLWKKQGLLLCGRLEWSQWEWGGSPSGKADEGDAEASCFLILKLYDHLVRKSKRNMPTGSNMGESKPWKAIKVDLLRCPRGSFAFAMLQWTGSRMFRRDLRWYALEEKNMMLDNHSLYDMTRGIQLPAKSEEEIFEHLGLEYLEPFERNA

SEQ ID NO: 4747 - DNA, 1584 bp, synthetic construct
  misc_feature 1..1584: note = Variant of terminal deoxynucleotidyltransferase
  source 1..1584: mol_type = other DNA
atgcaccatcatcatcatggcggtagcggcagccacggcattcgtaccatcgattcggacttcgggaagaaacagcagaaaaaaggcgataaccacgatagttccgccacttatgaaatcaaatttcacgagtttgtgctgttcattctcgaagaaaaaatgggtgcgacgcgtcgtacttttctgacagatttagcccgcaagaaagggttccgcgtcgagaatgaactgaccgacgaagttacccacatcgtggcagaaaatctgtcacgctctgaagtattggcttggctgaaagaacacaagatggagaagaccaagcaattcgaactgctggatattagctggcttatcgaaagcatgaaagttggtaaaccggtggacaccaaggggaaataccagttggcggaatcggttgaggtgagtgcgaacccagatccgacagaaggtcgtgtaaacgagctgcctcctactatgaaaaccgtttctccgtatgcgtgtcaacgccgcaccaccctgaacaaccgtaatcaacgttttacggactcgctggagattcttcgtgaaaattacgagctgaaaggcaacgacgatactgcgctggaatttcgtcgtgctatctccgtgctgaaaagccttccgtttgaggtacgtagcctgaaagacacggaaggattgccctggatcagtgatgaagtcaaagggattatggaagaaatcatcgaagtcggggagtcgcgtgaagtgcaggccgtgctcaatgatgagtggtatcaaagcttccacgcatttacgcgtgtctttggagtgggggtgaagacagcagacaagtggtaccgtatgggtctgcgcaccctcgaggatgttcgttccagcaagaccctgaagttgaccccgtggcagaaagtaggtctgctgtattatgaagatcttgctcgcggcgttacgcgtgccgaagctgacgcgatttggctgctggttcaggatgcagtcgcaactttcgacccggatgcgatcgtggagattgtcggtggacagcgtcgtgggaaacctcagggtcacgacgttgatctgcttatcagttctccgggagctgaaaaagagcaagaagaccaactcctgcagaaagtgatgaatctgtggaagaaacaagggttgttgctgtgtggtcgtctggaatggagtcagtgggaatgggggggttcgccttccggtaaggctgatgagggtgacgcggagtgttcgtgctttctgatcctcaaactttatgatcatctggtgcgtaaaagtaaacgcaatatgccgactggttcgaacatgggcgagtccaaaccgtggaaagcaattaaagtagatctgctgcgttgcccccgcggcagttttgcgtttgcgatgttgcagtggaccggaagccgcatgttccgtcgtgatctgcgctggtacgccctggaagagaagaacatgatgctggacaatcattcgctgtatgacatgactcgtggtatccaactccctgctaaatcggaagaggaaattttcgaacatctggggcttgaatacctggaaccgttcgaacgtaacgca

SEQ ID NO: 4748 - protein, 528 aa, synthetic construct
  REGION 1..528: note = Variant of terminal deoxynucleotidyltransferase
MHHHHHGGSGSHGIRTIDSDFGKKQQKKGDNHDSSATYEIKFHEFVLFILEEKMGATRRTFLTDLARKKGFRVENELTDEVTHIVAENLSRSEVLAWLKEHKMEKTKQFELLDISWLIESMKVGKPVDTKGKYQLAESVEVSANPDPTEGRVNELPPTMKTVSPYACQRRTTLNNRNQRFTDSLEILRENYELKGNDDTALEFRRAISVLKSLPFEVRSLKDTEGLPWISDEVKGIMEEIIEVGESREVQAVLNDEWYQSFHAFTRVFGVGVKTADKWYRMGLRTLEDVRSSKTLKLTPWQKVGLLYYEDLARGVTRAEADAIWLLVQDAVATFDPDAIVEIVGGQRRGKPQGHDVDLLISSPGAEKEQEDQLLQKVMNLWKKQGLLLCGRLEWSQWEWGGSPSGKADEGDAECSCFLILKLYDHLVRKSKRNMPTGSNMGESKPWKAIKVDLLRCPRGSFAFAMLQWTGSRMFRRDLRWYALEEKNMMLDNHSLYDMTRGIQLPAKSEEEIFEHLGLEYLEPFERNA

SEQ ID NO: 4749 - DNA, 1584 bp, synthetic construct
  misc_feature 1..1584: note = Variant of terminal deoxynucleotidyltransferase
  source 1..1584: mol_type = other DNA
atgcaccatcatcatcatggcggtagcggcagccacggcattcgtaccatcgattcggacttcgggaagaaacagcagaaaaaaggcgataaccacgatagttccgccacttatgaaatcaaatttcacgagtttgtgctgttcattctcgaagaaaaaatgggtgcgacgcgtcgtacttttctgacagatttagcccgcaagaaagggttccgcgtcgagaatgaactgaccgacgaagttacccacatcgtggcagaaaatctgtcacgctctgaagtattggcttggctgaaagaacacaagatggagaagaccaagcaattcgaactgctggatattagctggcttatcgaaagcatgaaagttggtaaaccggtggacaccaaggggaaataccagttggcggaatcggttgaggtgagtgcgaacccagatccgacagaaggtcgtgtaaacgagctgcctcctactatgaaaaccgtttctccgtatgcgtgtcaacgccgcaccaccctgaacaaccgtaatcaacgttttacggactcgctggagattcttcgtgaaaattacgagctgaaaggcaacgacgatactgcgctggaatttcgtcgtgctatctccgtgctgaaaagccttccgtttgaggtacgtagcctgaaagacacggaaggattgccctggatcagtgatgaagtcaaagggattatggaagaaatcatcgaagtcggggagtcgcgtgaagtgcaggccgtgctcaatgatgagtggtatcaaagcttccacgcatttacgcgtgtctttggagtgggggtgaagacagcagacaagtggtaccgtatgggtctgcgcaccctcgaggatgttcgttccagcaagaccctgaagttgaccccgtggcagaaagtaggtctgatgtattatgaagatcttgctcgcggcgttacgcgtgccgaagctgacgcgatttggctgctggttcaggatgcagtcgcaactttcgacccggatgcgatcgtggagattgtcggtggacagcgtcgtgggaaacctcagggtcacgacgttgatctgcttatcagttctccgggagctgaaaaagagcaagaagaccaactcctgcagaaagtgatgaatctgtggaagaaacaagggttgttgctgtgtggtcgtctggaatggagtcagtgggaatgggggggttcgccttccggtaaggctgatgagggtgacgcggaggcgtcgtgctttctgatcctcaaactttatgatcatctggtgcgtaaaagtaaacgcaatatgccgactggttcgaacatgggcgagtccaaaccgtggaaagcaattaaagtagatctgctgcgttgcccccgcggcagttttgcgtttgcgatgttgcagtggaccggaagccgcatgttccgtcgtgatctgcgctggtacgccctggaagagaagaacatgatgctggacaatcattcgctgtatgacatgactcgtggtatccaactccctgctaaatcggaagaggaaattttcgaacatctggggcttgaatacctggaaccgttcgaacgtaacgca

SEQ ID NO: 4750 - protein, 528 aa, synthetic construct
  REGION 1..528: note = Variant of terminal deoxynucleotidyltransferase
MHHHHHGGSGSHGIRTIDSDFGKKQQKKGDNHDSSATYEIKFHEFVLFILEEKMGATRRTFLTDLARKKGFRVENELTDEVTHIVAENLSRSEVLAWLKEHKMEKTKQFELLDISWLIESMKVGKPVDTKGKYQLAESVEVSANPDPTEGRVNELPPTMKTVSPYACQRRTTLNNRNQRFTDSLEILRENYELKGNDDTALEFRRAISVLKSLPFEVRSLKDTEGLPWISDEVKGIMEEIIEVGESREVQAVLNDEWYQSFHAFTRVFGVGVKTADKWYRMGLRTLEDVRSSKTLKLTPWQKVGLMYYEDLARGVTRAEADAIWLLVQDAVATFDPDAIVEIVGGQRRGKPQGHDVDLLISSPGAEKEQEDQLLQKVMNLWKKQGLLLCGRLEWSQWEWGGSPSGKADEGDAEASCFLILKLYDHLVRKSKRNMPTGSNMGESKPWKAIKVDLLRCPRGSFAFAMLQWTGSRMFRRDLRWYALEEKNMMLDNHSLYDMTRGIQLPAKSEEEIFEHLGLEYLEPFERNA

SEQ ID NO: 4751 - DNA, 1584 bp, synthetic construct
  misc_feature 1..1584: note = Variant of terminal deoxynucleotidyltransferase
  source 1..1584: mol_type = other DNA
atgcaccatcatcatcatggcggtagcggcagccacggcattcgtaccatcgattcggacttcgggaagaaacagcagaaaaaaggcgataaccacgatagttccgccacttatgaaatcaaatttcacgagtttgtgctgttcattctcgaagaaaaaatgggtgcgacgcgtcgtacttttctgacagatttagcccgcaagaaagggttccgcgtcgagaatgaactgaccgacgaagttacccacatcgtggcagaaaatctgtcacgctctgaagtattggcttggctgaaagaacacaagatggagaagaccaagcaattcgaactgctggatattagctggcttatcgaaagcatgaaagttggtaaaccggtggacaccaaggggaaataccagttggcggaatcggttgaggtgagtgcgaacccagatccgacagaaggtcgtgtaaacgagctgcctcctactatgaaaaccgtttctccgtatgcgtgtcaacgccgcaccaccctgaacaaccgtaatcaacgttttacggactcgctggagattcttcgtgaaaattacgagctgaaaggcaacgacgatactgcgctggaatttcgtcgtgctatctccgtgctgaaaagccttccgtttgaggtacgtagcctgaaagacacggaaggattgccctggatcagtgatgaagtcaaagggattatggaagaaatcatcgaagtcggggagtcgcgtgaagtgcaggccgtgctcaatgatgagtggtatcaaagcttccacgcatttacgcgtgtctttggagtgggggtgaagacagcagacaagtggtaccgtatgggtctgcgcaccctcgaggatgttcgttccagcaagaccctgaagttgaccccgtggcagaaagtaggtctgctgtattatgaagatcttaagcgcggcgttacgcgtgccgaagctgacgcgatttggctgctggttcaggatgcagtcgcaactttcgacccggatgcgatcgtggagattgtcggtggacagcgtcgtgggaaacctcagggtcacgacgttgatctgcttatcagttctccgggagctgaaaaagagcaagaagaccaactcctgcagaaagtgatgaatctgtggaagaaacaagggttgttgctgtgtggtcgtctggaatggagtcagtgggaatgggggggttcgccttccggtaaggctgatgagggtgacgcggaggcgtcgtgctttctgatcctcaaactttatgatcatctggtgcgtaaaagtaaacgcaatatgccgactggttcgaacatgggcgagtccaaaccgtggaaagcaattaaagtagatctgctgcgttgcccccgcggcagttttgcgtttgcgatgttgcagtggaccggaagccgcatgttccgtcgtgatctgcgctggtacgccctggaagagaagaacatgatgctggacaatcattcgctgtatgacatgactcgtggtatccaactccctgctaaatcggaagaggaaattttcgaacatctggggcttgaatacctggaaccgttcgaacgtaacgca

SEQ ID NO: 4752 - protein, 528 aa, synthetic construct
  REGION 1..528: note = Variant of terminal deoxynucleotidyltransferase
MHHHHHGGSGSHGIRTIDSDFGKKQQKKGDNHDSSATYEIKFHEFVLFILEEKMGATRRTFLTDLARKKGFRVENELTDEVTHIVAENLSRSEVLAWLKEHKMEKTKQFELLDISWLIESMKVGKPVDTKGKYQLAESVEVSANPDPTEGRVNELPPTMKTVSPYACQRRTTLNNRNQRFTDSLEILRENYELKGNDDTALEFRRAISVLKSLPFEVRSLKDTEGLPWISDEVKGIMEEIIEVGESREVQAVLNDEWYQSFHAFTRVFGVGVKTADKWYRMGLRTLEDVRSSKTLKLTPWQKVGLLYYEDLKRGVTRAEADAIWLLVQDAVATFDPDAIVEIVGGQRRGKPQGHDVDLLISSPGAEKEQEDQLLQKVMNLWKKQGLLLCGRLEWSQWEWGGSPSGKADEGDAEASCFLILKLYDHLVRKSKRNMPTGSNMGESKPWKAIKVDLLRCPRGSFAFAMLQWTGSRMFRRDLRWYALEEKNMMLDNHSLYDMTRGIQLPAKSEEEIFEHLGLEYLEPFERNA

SEQ ID NO: 4753 - DNA, 1584 bp, synthetic construct
  misc_feature 1..1584: note = Variant of terminal deoxynucleotidyltransferase
  source 1..1584: mol_type = other DNA
atgcaccatcatcatcatggcggtagcggcagccacggcattcgtaccatcgattcggacttcgggaagaaacagcagaaaaaaggcgataaccacgatagttccgccacttatgaaatcaaatttcacgagtttgtgctgttcattctcgaagaaaaaatgggtgcgacgcgtcgtacttttctgacagatttagcccgcaagaaagggttccgcgtcgagaatgaactgaccgacgaagttacccacatcgtggcagaaaatctgtcacgctctgaagtattggcttggctgaaagaacacaagatggagaagaccaagcaattcgaactgctggatattagctggcttatcgaaagcatgaaagttggtaaaccggtggacaccaaggggaaataccagttggcggaatcggttgaggtgagtgcgaacccagatccgacagaaggtcgtgtaaacgagctgcctcctactatgaaaaccgtttctccgtatgcgtgtcaacgccgcaccaccctgaacaaccgtaatcaacgttttacgtgttcgctggagattcttcgtgaaaattacgagctgaaaggcaacgacgatactgcgctggaatttcgtcgtgctatctccgtgctgaaaagccttccgtttgaggtacgtagcctgaaagacacggaaggattgccctggatcagtgatgaagtcaaagggattatggaagaaatcatcgaagtcggggagtcgcgtgaagtgcaggccgtgctcaatgatgagtggtatcaaagcttccacgcatttacgcgtgtctttggagtgggggtgaagacagcagacaagtggtaccgtatgggtctgcgcaccctcgaggatgttcgttccagcaagaccctgaagttgaccccgtggcagaaagtaggtctgctgtattatgaagatcttgctcgcggcgttacgcgtgccgaagctgacgcgatttggctgctggttcaggatgcagtcgcaactttcgacccggatgcgatcgtggagattgtcggtggacagcgtcgtgggaaacctcagggtcacgacgttgatctgcttatcagttctccgggagctgaaaaagagcaagaagaccaactcctgcagaaagtgatgaatctgtggaagaaacaagggttgttgctgtgtggtcgtctggaatggagtcagtgggaatgggggggttcgccttccggtaaggctgatgagggtgacgcggaggcgtcgtgctttctgatcctcaaactttatgatcatctggtgcgtaaaagtaaacgcaatatgccgactggttcgaacatgggcgagtccaaaccgtggaaagcaattaaagtagatctgctgcgttgcccccgcggcagttttgcgtttgcgatgttgcagtggaccggaagccgcatgttccgtcgtgatctgcgctggtacgccctggaagagaagaacatgatgctggacaatcattcgctgtatgacatgactcgtggtatccaactccctgctaaatcggaagaggaaattttcgaacatctggggcttgaatacctggaaccgttcgaacgtaacgca

SEQ ID NO: 4754 - protein, 528 aa, synthetic construct
  REGION 1..528: note = Variant of terminal deoxynucleotidyltransferase
MHHHHHGGSGSHGIRTIDSDFGKKQQKKGDNHDSSATYEIKFHEFVLFILEEKMGATRRTFLTDLARKKGFRVENELTDEVTHIVAENLSRSEVLAWLKEHKMEKTKQFELLDISWLIESMKVGKPVDTKGKYQLAESVEVSANPDPTEGRVNELPPTMKTVSPYACQRRTTLNNRNQRFTCSLEILRENYELKGNDDTALEFRRAISVLKSLPFEVRSLKDTEGLPWISDEVKGIMEEIIEVGESREVQAVLNDEWYQSFHAFTRVFGVGVKTADKWYRMGLRTLEDVRSSKTLKLTPWQKVGLLYYEDLARGVTRAEADAIWLLVQDAVATFDPDAIVEIVGGQRRGKPQGHDVDLLISSPGAEKEQEDQLLQKVMNLWKKQGLLLCGRLEWSQWEWGGSPSGKADEGDAEASCFLILKLYDHLVRKSKRNMPTGSNMGESKPWKAIKVDLLRCPRGSFAFAMLQWTGSRMFRRDLRWYALEEKNMMLDNHSLYDMTRGIQLPAKSEEEIFEHLGLEYLEPFERNA

SEQ ID NO: 4755 - DNA, 1584 bp, synthetic construct
  misc_feature 1..1584: note = Variant of terminal deoxynucleotidyltransferase
  source 1..1584: mol_type = other DNA
atgcaccatcatcatcatggcggtagcggcagccacggcattcgtaccatcgattcggacttcgggaagaaacagcagaaaaaaggcgataaccacgatagttccgccacttatgaaatcaaatttcacgagtttgtgctgttcattctcgaagaaaaaatgggtgcgacgcgtcgtacttttctgacagatttagcccgcaagaaagggttccgcgtcgagaatgaactgaccgacgaagttacccacatcgtggcagaaaatctgtcacgctctgaagtattggcttggctgaaagaacacaagatggagaagaccaagcaattcgaactgctggatattagctggcttatcgaaagcatgaaagttggtaaaccggtggacaccaaggggaaataccagttggcggaatcggttgaggtgagtgcgaacccagatccgacagaaggtcgtgtaaacgagctgcctcctactatgaaaaccgtttctccgtatgcgtgtcaacgccgcaccaccctgaacaaccgtaatcaacgttttacggactcgctggagattcttcgtgaaaattacgagctgaaaggcaacgacgatactgcgctggaatttcgtcgtgctatctccgtgctgaaaagccttccgtttgaggtacgtagcctgaaagacacggaaggattgccctggatcagtgatgaagtcaaagggattatggaagaaatcatcgaagtcggggagtcgcgtgaagtgcaggccgtgctcaatgatgagtggtatcaaagcttccacgcatttacgcgtgtctttggagtgggggtgaagacagcagacaagtggtaccgtatgggtctgcgcaccctcgaggatgttcgttccagcaagaccctgaagttgaccccgtggcagaaagtaggtctgctgtattatgaagatcttgctcgcggcgtttttcgtgccgaagctgacgcgatttggctgctggttcaggatgcagtcgcaactttcgacccggatgcgatcgtggagattgtcggtggacagcgtcgtgggaaacctcagggtcacgacgttgatctgcttatcagttctccgggagctgaaaaagagcaagaagaccaactcctgcagaaagtgatgaatctgtggaagaaacaagggttgttgctgtgtggtcgtctggaatggagtcagtgggaatgggggggttcgccttccggtaaggctgatgagggtgacgcggaggcgtcgtgctttctgatcctcaaactttatgatcatctggtgcgtaaaagtaaacgcaatatgccgactggttcgaacatgggcgagtccaaaccgtggaaagcaattaaagtagatctgctgcgttgcccccgcggcagttttgcgtttgcgatgttgcagtggaccggaagccgcatgttccgtcgtgatctgcgctggtacgccctggaagagaagaacatgatgctggacaatcattcgctgtatgacatgactcgtggtatccaactccctgctaaatcggaagaggaaattttcgaacatctggggcttgaatacctggaaccgttcgaacgtaacgca

SEQ ID NO: 4756 - protein, 528 aa, synthetic construct
  REGION 1..528: note = Variant of terminal deoxynucleotidyltransferase
MHHHHHGGSGSHGIRTIDSDFGKKQQKKGDNHDSSATYEIKFHEFVLFILEEKMGATRRTFLTDLARKKGFRVENELTDEVTHIVAENLSRSEVLAWLKEHKMEKTKQFELLDISWLIESMKVGKPVDTKGKYQLAESVEVSANPDPTEGRVNELPPTMKTVSPYACQRRTTLNNRNQRFTDSLEILRENYELKGNDDTALEFRRAISVLKSLPFEVRSLKDTEGLPWISDEVKGIMEEIIEVGESREVQAVLNDEWYQSFHAFTRVFGVGVKTADKWYRMGLRTLEDVRSSKTLKLTPWQKVGLLYYEDLARGVFRAEADAIWLLVQDAVATFDPDAIVEIVGGQRRGKPQGHDVDLLISSPGAEKEQEDQLLQKVMNLWKKQGLLLCGRLEWSQWEWGGSPSGKADEGDAEASCFLILKLYDHLVRKSKRNMPTGSNMGESKPWKAIKVDLLRCPRGSFAFAMLQWTGSRMFRRDLRWYALEEKNMMLDNHSLYDMTRGIQLPAKSEEEIFEHLGLEYLEPFERNA

SEQ ID NO: 4757 - DNA, 1584 bp, synthetic construct
  misc_feature 1..1584: note = Variant of terminal deoxynucleotidyltransferase
  source 1..1584: mol_type = other DNA
atgcaccatcatcatcatggcggtagcggcagccacggcattcgtaccatcgattcggacttcgggaagaaacagcagaaaaaaggcgataaccacgatagttccgccacttatgaaatcaaatttcacgagtttgtgctgttcattctcgaagaaaaaatgggtgcgacgcgtcgtacttttctgacagatttagcccgcaagaaagggttccgcgtcgagaatgaactgaccgacgaagttacccacatcgtggcagaaaatctgtcacgctctgaagtattggcttggctgaaagaacacaagatggagaagaccaagcaattcgaactgctggatattagctggcttatcgaaagcatgaaagttggtaaaccggtggacaccaaggggaaataccagttggcggaatcggttgaggtgagtgcgaacccagatccgacagaaggtcgtgtaaacgagctgcctcctactatgaaaaccgtttctccgtatgcgtgtcaacgccgcaccaccctgaacaaccgtaatcaacgttttacggactcgctggagattcttcgtgaaaattacgagctgaaaggcaacgacgatactgcgctggaatttcgtcgtgctatctccgtgctgaaaagccttccgtttgaggtacgtagcctgaaagacacggaaggattgccctggatcagtgatgaagtcaaagggattatggaagaaatcatcgaagtcggggagtcgcgtgaagtgcaggccgtgctcaatgatgagtggtatcaaagcttccacgcatttacgcgtgtctttggagtgggggtgaagacagcagacaagtggtaccgtatgggtctgcgcaccctcgaggatgttcgttccagcaagaccctgaagttgaccccgtggcagaaagtaggtctgctgtattatgaagatcttgctcgcggcgttacgcgtgccgaagctgacgcgatttggctgctggttcaggatgcagtcgcaactttcgacccggatgcgatcgtggagattgtcggtggacagcgtcgtgggaaacctcagggtcacgacgttgatctgcttatcagttctccgggagctgaaaaagagcaagaagaccaactcctgcagaaagtgatgaatctgtttaagaaacaagggttgttgctgtgtggtcgtctggaatggagtcagtgggaatgggggggttcgccttccggtaaggctgatgagggtgacgcggaggcgtcgtgctttctgatcctcaaactttatgatcatctggtgcgtaaaagtaaacgcaatatgccgactggttcgaacatgggcgagtccaaaccgtggaaagcaattaaagtagatctgctgcgttgcccccgcggcagttttgcgtttgcgatgttgcagtggaccggaagccgcatgttccgtcgtgatctgcgctggtacgccctggaagagaagaacatgatgctggacaatcattcgctgtatgacatgactcgtggtatccaactccctgctaaatcggaagaggaaattttcgaacatctggggcttgaatacctggaaccgttcgaacgtaacgca

SEQ ID NO: 4758 - protein, 528 aa, synthetic construct
  REGION 1..528: note = Variant of terminal deoxynucleotidyltransferase
MHHHHHGGSGSHGIRTIDSDFGKKQQKKGDNHDSSATYEIKFHEFVLFILEEKMGATRRTFLTDLARKKGFRVENELTDEVTHIVAENLSRSEVLAWLKEHKMEKTKQFELLDISWLIESMKVGKPVDTKGKYQLAESVEVSANPDPTEGRVNELPPTMKTVSPYACQRRTTLNNRNQRFTDSLEILRENYELKGNDDTALEFRRAISVLKSLPFEVRSLKDTEGLPWISDEVKGIMEEIIEVGESREVQAVLNDEWYQSFHAFTRVFGVGVKTADKWYRMGLRTLEDVRSSKTLKLTPWQKVGLLYYEDLARGVTRAEADAIWLLVQDAVATFDPDAIVEIVGGQRRGKPQGHDVDLLISSPGAEKEQEDQLLQKVMNLFKKQGLLLCGRLEWSQWEWGGSPSGKADEGDAEASCFLILKLYDHLVRKSKRNMPTGSNMGESKPWKAIKVDLLRCPRGSFAFAMLQWTGSRMFRRDLRWYALEEKNMMLDNHSLYDMTRGIQLPAKSEEEIFEHLGLEYLEPFERNA

SEQ ID NO: 4759 - DNA, 1584 bp, synthetic construct
  misc_feature 1..1584: note = Variant of terminal deoxynucleotidyltransferase
  source 1..1584: mol_type = other DNA
atgcaccatcatcatcatggcggtagcggcagccacggcattcgtaccatcgattcggacttcgggaagaaacagcagaaaaaaggcgataaccacgatagttccgccacttatgaaatcaaatttcacgagtttgtgctgttcattctcgaagaaaaaatgggtgcgacgcgtcgtacttttctgacagatttagcccgcaagaaagggttccgcgtcgagaatgaactgaccgacgaagttacccacatcgtggcagaaaatctgtcacgctctgaagtattggcttggctgaaagaacacaagatggagaagaccaagcaattcgaactgctggatattagctggcttatcgaaagcatgaaagttggtaaaccggtggacaccaaggggaaataccagttggcggaatcggttgaggtgagtgcgaacccagatccgacagaaggtcgtgtaaacgagctgcctcctactatgaaaaccgtttctccgtatgcgtgtcaacgccgcaccaccctgaacaaccgtaatcaacgttttacggactcgctggagattcttcgtgaaaattacgagctgaaaggcaacgacgatactgcgctggaatttcgtcgtgctatctccgtgctgaaaagccttccgtttgaggtacgtagcctgaaagacacggaaggattgccctggatcagtgatgaagtcaaagggattatggaagaaatcatcgaagtcggggagtcgcgtgaagtgcaggccgtgctcaatgatgagtggtatcaaagcttccacgcatttacgcgtgtctttggagtgggggtgaagacagcagacaagtggtaccgtatgggtctgcgcaccctcgaggatgttcgttccagcaagaccctgaagttgaccccgtggcagaaagtaggtctgctgtattatgaagatcttgctcgcggcgttacgcgtgccgaagctgacgcgatttggctgctggttcaggatgcagtcgcaactttcgacccggatgcgatcgtggagattgtcggtggacagcgtcgtgggaaacctcagggtcacgacgttgatctgcttatcagttctccgggagctgaaaaagagcaagaagaccaactcctgcagaaagtgatgaatctgtggaagaaacaagggttgttgctgtgtggtcgtctggaatggagtcagtgggaatgggggggttcgcctgctggtaaggctgatgagggtgacgcggaggcgtcgtgctttctgatcctcaaactttatgatcatctggtgcgtaaaagtaaacgcaatatgccgactggttcgaacatgggcgagtccaaaccgtggaaagcaattaaagtagatctgctgcgttgcccccgcggcagttttgcgtttgcgatgttgcagtggaccggaagccgcatgttccgtcgtgatctgcgctggtacgccctggaagagaagaacatgatgctggacaatcattcgctgtatgacatgactcgtggtatccaactccctgctaaatcggaagaggaaattttcgaacatctggggcttgaatacctggaaccgttcgaacgtaacgca

SEQ ID NO: 4760 - protein, 528 aa, synthetic construct
  REGION 1..528: note = Variant of terminal deoxynucleotidyltransferase
MHHHHHGGSGSHGIRTIDSDFGKKQQKKGDNHDSSATYEIKFHEFVLFILEEKMGATRRTFLTDLARKKGFRVENELTDEVTHIVAENLSRSEVLAWLKEHKMEKTKQFELLDISWLIESMKVGKPVDTKGKYQLAESVEVSANPDPTEGRVNELPPTMKTVSPYACQRRTTLNNRNQRFTDSLEILRENYELKGNDDTALEFRRAISVLKSLPFEVRSLKDTEGLPWISDEVKGIMEEIIEVGESREVQAVLNDEWYQSFHAFTRVFGVGVKTADKWYRMGLRTLEDVRSSKTLKLTPWQKVGLLYYEDLARGVTRAEADAIWLLVQDAVATFDPDAIVEIVGGQRRGKPQGHDVDLLISSPGAEKEQEDQLLQKVMNLWKKQGLLLCGRLEWSQWEWGGSPAGKADEGDAEASCFLILKLYDHLVRKSKRNMPTGSNMGESKPWKAIKVDLLRCPRGSFAFAMLQWTGSRMFRRDLRWYALEEKNMMLDNHSLYDMTRGIQLPAKSEEEIFEHLGLEYLEPFERNA

SEQ ID NO: 4761 - DNA, 1584 bp, synthetic construct
  misc_feature 1..1584: note = Variant of terminal deoxynucleotidyltransferase
  source 1..1584: mol_type = other DNA
atgcaccatcatcatcatggcggtagcggcagccacggcattcgtaccatcgattcggacttcgggaagaaacagcagaaaaaaggcgataaccacgatagttccgccacttatgaaatcaaatttcacgagtttgtgctgttcattctcgaagaaaaaatgggtgcgacgcgtcgtacttttctgacagatttagcccgcaagaaagggttccgcgtcgagaatgaactgaccgacgaagttacccacatcgtggcagaaaatctgtcacgctctgaagtattggcttggctgaaagaacacaagatggagaagaccaagcaattcgaactgctggatattagctggcttatcgaaagcatgaaagttggtaaaccggtggacaccaaggggaaataccagttggcggaatcggttgaggtgagtgcgaacccagatccgacagaaggtcgtgtaaacgagctgcctcctactatgaaaaccgtttctccgtatgcgtgtcaacgccgcaccaccctgaacaaccgtaatcaacgttttacggactcgctggagattcttcgtgaaaattacgagctgaaaggcaacgacgatactgcgctggaatttcgtcgtgctatctccgtgctgaaaagccttccgtttgaggtacgtagcctgaaagacacggaaggattgccctggatcagtgatgaagtcaaagggattatggaagaaatcatcgaagtcggggagtcgcgtgaagtgcaggccgtgctcaatgatgagtggtatcaaagcttccacgcatttacgcgtgtctttggagtgggggtgaagacagcagacaagtggtaccgtatgggtctgcgcaccctcgaggatgttcgttccagcaagaccctgaagttgaccccgtggcagaaagtaggtctgctgtattatgaagatcttgctcgcggcgttacgcgtgccgaagctgacgcgatttggctgctggttcaggatgcagtcgcaactttcgacccggatgcgatcgtggagattgtcggtggacagcgtcgtgggaaacctcagggtcacgacgttgatctgcttatcagttctccgggagctgaaaaagagcaagaagaccaactcctgcagaaagtgatgaatctgtggaagaaacaagggttgttgctgtgtggtcgtctggaatggagtcagtgggaatgggggggttcgccttccggtaaggctgatgagggtgacgcggagccgtcgtgctttctgatcctcaaactttatgatcatctggtgcgtaaaagtaaacgcaatatgccgactggttcgaacatgggcgagtccaaaccgtggaaagcaattaaagtagatctgctgcgttgcccccgcggcagttttgcgtttgcgatgttgcagtggaccggaagccgcatgttccgtcgtgatctgcgctggtacgccctggaagagaagaacatgatgctggacaatcattcgctgtatgacatgactcgtggtatccaactccctgctaaatcggaagaggaaattttcgaacatctggggcttgaatacctggaaccgttcgaacgtaacgca

SEQ ID NO: 4762 - protein, 528 aa, synthetic construct
  REGION 1..528: note = Variant of terminal deoxynucleotidyltransferase
MHHHHHGGSGSHGIRTIDSDFGKKQQKKGDNHDSSATYEIKFHEFVLFILEEKMGATRRTFLTDLARKKGFRVENELTDEVTHIVAENLSRSEVLAWLKEHKMEKTKQFELLDISWLIESMKVGKPVDTKGKYQLAESVEVSANPDPTEGRVNELPPTMKTVSPYACQRRTTLNNRNQRFTDSLEILRENYELKGNDDTALEFRRAISVLKSLPFEVRSLKDTEGLPWISDEVKGIMEEIIEVGESREVQAVLNDEWYQSFHAFTRVFGVGVKTADKWYRMGLRTLEDVRSSKTLKLTPWQKVGLLYYEDLARGVTRAEADAIWLLVQDAVATFDPDAIVEIVGGQRRGKPQGHDVDLLISSPGAEKEQEDQLLQKVMNLWKKQGLLLCGRLEWSQWEWGGSPSGKADEGDAEPSCFLILKLYDHLVRKSKRNMPTGSNMGESKPWKAIKVDLLRCPRGSFAFAMLQWTGSRMFRRDLRWYALEEKNMMLDNHSLYDMTRGIQLPAKSEEEIFEHLGLEYLEPFERNA

SEQ ID NO: 4763 - DNA, 1584 bp, synthetic construct
  misc_feature 1..1584: note = Variant of terminal deoxynucleotidyltransferase
  source 1..1584: mol_type = other DNA
atgcaccatcatcatcatggcggtagcggcagccacggcattcgtaccatcgattcggacttcgggaagaaacagcagaaaaaaggcgataaccacgatagttccgccacttatgaaatcaaatttcacgagtttgtgctgttcattctcgaagaaaaaatgggtgcgacgcgtcgtacttttctgacagatttagcccgcaagaaagggttccgcgtcgagaatgaactgaccgacgaagttacccacatcgtggcagaaaatctgtcacgctctgaagtattggcttggctgaaagaacacaagatggagaagaccaagcaattcgaactgctggatattagctggcttatcgaaagcatgaaagttggtaaaccggtggacaccaaggggaaataccagttggcggaatcggttgaggtgagtgcgaacccagatccgacagaaggtcgtgtaaacgagctgcctcctactatgaaaaccgtttctccgtatgcgtgtcaacgccgcaccaccctgaacaaccgtaatcaacgttttacggactcgctggagattcttcgtgaaaattacgagctgaaaggcaacgacgatactgcgctggaatttcgtcgtgctatctccgtgctgaaaagccttccgtttgaggtacgtagcctgaaagacacggaaggattgccctggatcagtgatgaagtcaaagggattatggaagaaatcatcgaagtcggggagtcgcgtgaagtgcaggccgtgctcaatgatgagtggtatcaaagcttccacgcatttacgcgtgtctttggagtgggggtgaagacagcagacaagtggtaccgtatgggtctgcgcaccctcgaggatgttcgttccagcaagaccctgaagttgaccccgtggcagaaagtaggtctgctgtattatgaagatcttgctcgcggcgttacgcgtgccgaagctgacgcgatttggctgctggttcaggatgcagtcgcaactttcgacccggatgcgatcgtggagattgtcggtggacagcgtcgtgggaaacctcagggtcacgacgttgatctgcttatcagttctccgggagctgaaaaagagcaagaagaccaactcctgcagaaagtgatgaatctgtggaagaaacaagggttgttgctgtgtggtcgtctggaatggagtcagtgggaatgggggggttcgccttccctgaaggctgatgagggtgacgcggaggcgtcgtgctttctgatcctcaaactttatgatcatctggtgcgtaaaagtaaacgcaatatgccgactggttcgaacatgggcgagtccaaaccgtggaaagcaattaaagtagatctgctgcgttgcccccgcggcagttttgcgtttgcgatgttgcagtggaccggaagccgcatgttccgtcgtgatctgcgctggtacgccctggaagagaagaacatgatgctggacaatcattcgctgtatgacatgactcgtggtatccaactccctgctaaatcggaagaggaaattttcgaacatctggggcttgaatacctggaaccgttcgaacgtaacgca

SEQ ID NO: 4764 - protein, 528 aa, synthetic construct
  REGION 1..528: note = Variant of terminal deoxynucleotidyltransferase
MHHHHHGGSGSHGIRTIDSDFGKKQQKKGDNHDSSATYEIKFHEFVLFILEEKMGATRRTFLTDLARKKGFRVENELTDEVTHIVAENLSRSEVLAWLKEHKMEKTKQFELLDISWLIESMKVGKPVDTKGKYQLAESVEVSANPDPTEGRVNELPPTMKTVSPYACQRRTTLNNRNQRFTDSLEILRENYELKGNDDTALEFRRAISVLKSLPFEVRSLKDTEGLPWISDEVKGIMEEIIEVGESREVQAVLNDEWYQSFHAFTRVFGVGVKTADKWYRMGLRTLEDVRSSKTLKLTPWQKVGLLYYEDLARGVTRAEADAIWLLVQDAVATFDPDAIVEIVGGQRRGKPQGHDVDLLISSPGAEKEQEDQLLQKVMNLWKKQGLLLCGRLEWSQWEWGGSPSLKADEGDAEASCFLILKLYDHLVRKSKRNMPTGSNMGESKPWKAIKVDLLRCPRGSFAFAMLQWTGSRMFRRDLRWYALEEKNMMLDNHSLYDMTRGIQLPAKSEEEIFEHLGLEYLEPFERNA

SEQ ID NO: 4765 - DNA, 1584 bp, synthetic construct
  misc_feature 1..1584: note = Variant of terminal deoxynucleotidyltransferase
  source 1..1584: mol_type = other DNA
atgcaccatcatcatcatggcggtagcggcagccacggcattcgtaccatcgattcggacttcgggaagaaacagcagaaaaaaggcgataaccacgatagttccgccacttatgaaatcaaatttcacgagtttgtgctgttcattctcgaagaaaaaatgggtgcgacgcgtcgtacttttctgacagatttagcccgcaagaaagggttccgcgtcgagaatgaactgaccgacgaagttacccacatcgtggcagaaaatctgtcacgctctgaagtattggcttggctgaaagaacacaagatggagaagaccaagcaattcgaactgctggatattagctggcttatcgaaagcatgaaagttggtaaaccggtggacaccaaggggaaataccagttggcggaatcggttgaggtgagtgcgaacccagatccgacagaaggtcgtgtaaacgagctgcctcctactatgaaaaccgtttctccgtatgcgtgtcaacgccgcaccaccctgaacaaccgtaatcaacgttttacggactcgctggagattcttcgtgaaaattacgagctgaaaggcaacgacgatactgcgctggaatttcgtcgtgctatctccgtgctgaaaagccttccgtttgaggtacgtagcctgaaagacacggaaggattgccctggatcagtgatgaagtcaaagggattatggaagaaatcatcgaagtcggggagtcgcgtgaagtgcaggccgtgctcaatgatgagtggtatcaaagcttccacgcatttacgcgtgtctttggagtgggggtgaagacagcagacaagtggtaccgtatgggtctgcgcaccctcgaggatgttcgttccagcaagaccctgaagttgaccccgtggcagaaagtaggtctgctgtattatgaagatcttgctcgcggcgttacgcgtgccgaagctgacgcgatttggctgctggttcaggatgcagtcgcaactttcgacccggatgcgatcgtggagattgtcggtggacagcgtcgtgggaaacctcagggtcacgacgttgatctgcttatcagttctccgggagctgaaaaagagcaagaagaccaactcatgcagaaagtgatgaatctgtggaagaaacaagggttgttgctgtgtggtcgtctggaatggagtcagtgggaatgggggggttcgccttccggtaaggctgatgagggtgacgcggaggcgtcgtgctttctgatcctcaaactttatgatcatctggtgcgtaaaagtaaacgcaatatgccgactggttcgaacatgggcgagtccaaaccgtggaaagcaattaaagtagatctgctgcgttgcccccgcggcagttttgcgtttgcgatgttgcagtggaccggaagccgcatgttccgtcgtgatctgcgctggtacgccctggaagagaagaacatgatgctggacaatcattcgctgtatgacatgactcgtggtatccaactccctgctaaatcggaagaggaaatcttcgaacatctggggcttgaatacctggaaccgttcgaacgtaacgca

SEQ ID NO: 4766 - protein, 528 aa, synthetic construct
  REGION 1..528: note = Variant of terminal deoxynucleotidyltransferase
MHHHHHGGSGSHGIRTIDSDFGKKQQKKGDNHDSSATYEIKFHEFVLFILEEKMGATRRTFLTDLARKKGFRVENELTDEVTHIVAENLSRSEVLAWLKEHKMEKTKQFELLDISWLIESMKVGKPVDTKGKYQLAESVEVSANPDPTEGRVNELPPTMKTVSPYACQRRTTLNNRNQRFTDSLEILRENYELKGNDDTALEFRRAISVLKSLPFEVRSLKDTEGLPWISDEVKGIMEEIIEVGESREVQAVLNDEWYQSFHAFTRVFGVGVKTADKWYRMGLRTLEDVRSSKTLKLTPWQKVGLLYYEDLARGVTRAEADAIWLLVQDAVATFDPDAIVEIVGGQRRGKPQGHDVDLLISSPGAEKEQEDQLMQKVMNLWKKQGLLLCGRLEWSQWEWGGSPSGKADEGDAEASCFLILKLYDHLVRKSKRNMPTGSNMGESKPWKAIKVDLLRCPRGSFAFAMLQWTGSRMFRRDLRWYALEEKNMMLDNHSLYDMTRGIQLPAKSEEEIFEHLGLEYLEPFERNA

SEQ ID NO: 4767 - DNA, 1584 bp, synthetic construct
  misc_feature 1..1584: note = Variant of terminal deoxynucleotidyltransferase
  source 1..1584: mol_type = other DNA
atgcaccatcatcatcatggcggtagcggcagccacggcattcgtaccatcgattcggacttcgggaagaaacagcagaaaaaaggcgataaccacgatagttccgccacttatgaaatcaaatttcacgagtttgtgctgttcattctcgaagaaaaaatgggtgcgacgcgtcgtacttttctgacagatttagcccgcaagaaagggttccgcgtcgagaatgaactgaccgacgaagttacccacatcgtggcagaaaatctgtcacgctctgaagtattggcttggctgaaagaacacaagatggagaagaccaagcaattcgaactgctggatattagctggcttatcgaaagcatgaaagttggtaaaccggtggacaccaaggggaaataccagttggcggaatcggttgaggtgagtgcgaacccagatccgacagaaggtcgtgtaaacgagctgcctcctactatgaaaaccgtttctccgtatgcgtgtcaacgccgcaccaccctgaacaaccgtaatcaacgttttacggactcgctggagattcttcgtgttatgtacgagctgaaaggcaacgacgatactgcgctggaatttcgtcgtgctatctccgtgctgaaaagccttccgtttgaggtacgtagcctgaaagacacggaaggattgccctggatcagtgatgaagtcaaagggattatggaagaaatcatcgaagtcggggagtcgcgtgaagtgcaggccgtgctcaatgatgagtggtatcaaagcttccacgcatttacgcgtgtctttggagtgggggtgaagacagcagacaagtggtaccgtatgggtctgcgcaccctcgaggatgttcgttccagcaagaccctgaagttgaccccgtggcagaaagtaggtctgctgtattatgaagatcttgctcgcggcgttacgcgtgccgaagctgacgcgatttggctgctggttcaggatgcagtcgcaactttcgacccggatgcgatcgtggagattgtcggtggacagcgtcgtgggaaacctcagggtcacgacgttgatctgcttatcagttctccgggagctgaaaaagagcaagaagaccaactcctgcagaaagtgatgaatctgtggaagaaacaagggttgttgctgtgtggtcgtctggaatggagtcagtgggaatgggggggttcgccttccggtaaggctgatgagggtgacgcggaggcgtcgtgctttctgatcctcaaactttatgatcatctggtgcgtaaaagtaaacgcaatatgccgactggttcgaacatgggcgagtccaaaccgtggaaagcaattaaagtagatctgctgcgttgcccccgcggcagttttgcgtttgcgatgttgcagtggaccggaagccgcatgttccgtcgtgatctgcgctggtacgccctggaagagaagaacatgatgctggacaatcattcgctgtatgacatgactcgtggtatccaactccctgctaaatcggaagaggaaattttcgaacatctggggcttgaatacctggaaccgttcgaacgtaacgca

SEQ ID NO: 4768 - protein, 528 aa, synthetic construct
  REGION 1..528: note = Variant of terminal deoxynucleotidyltransferase
MHHHHHGGSGSHGIRTIDSDFGKKQQKKGDNHDSSATYEIKFHEFVLFILEEKMGATRRTFLTDLARKKGFRVENELTDEVTHIVAENLSRSEVLAWLKEHKMEKTKQFELLDISWLIESMKVGKPVDTKGKYQLAESVEVSANPDPTEGRVNELPPTMKTVSPYACQRRTTLNNRNQRFTDSLEILRVMYELKGNDDTALEFRRAISVLKSLPFEVRSLKDTEGLPWISDEVKGIMEEIIEVGESREVQAVLNDEWYQSFHAFTRVFGVGVKTADKWYRMGLRTLEDVRSSKTLKLTPWQKVGLLYYEDLARGVTRAEADAIWLLVQDAVATFDPDAIVEIVGGQRRGKPQGHDVDLLISSPGAEKEQEDQLLQKVMNLWKKQGLLLCGRLEWSQWEWGGSPSGKADEGDAEASCFLILKLYDHLVRKSKRNMPTGSNMGESKPWKAIKVDLLRCPRGSFAFAMLQWTGSRMFRRDLRWYALEEKNMMLDNHSLYDMTRGIQLPAKSEEEIFEHLGLEYLEPFERNA

SEQ ID NO: 4769 - DNA, 1584 bp, synthetic construct
  misc_feature 1..1584: note = Variant of terminal deoxynucleotidyltransferase
  source 1..1584: mol_type = other DNA
atgcaccatcatcatcatggcggtagcggcagccacggcattcgtaccatcgattcggacttcgggaagaaacagcagaaaaaaggcgataaccacgatagttccgccacttatgaaatcaaatttcacgagtttgtgctgttcattctcgaagaaaaaatgggtgcgacgcgtcgtacttttctgacagatttagcccgcaagaaagggttccgcgtcgagaatgaactgaccgacgaagttacccacatcgtggcagaaaatctgtcacgctctgaagtattggcttggctgaaagaacacaagatggagaagaccaagcaattcgaactgctggatattagctggcttatcgaaagcatgaaagttggtaaaccggtggacaccaaggggaaataccagttggcggaatcggttgaggtgagtgcgaacccagatccgacagaaggtcgtgtaaacgagctgcctcctactatgaaaaccgtttctccgtatgcgtgtcaacgccgcaccaccctgaacaaccgtaatcaacgttttacggactcgctggagattcttcgtgaaaattacgagctgaaaggcaacgacgatactgcgctggaatttcgtcgtgctatctccgtgctgaaaagccttccgtttgaggtacgtagcctgaaagacacggaaggattgccctggatcagtgatgaagtcaaagggattatggaagaaatcatcgaagtcggggagtcgcgtgaagtgcaggccgtgctcaatgatgagtggtatcaaagcttccacgcatttacgcgtgtctttggagtgggggtgaagacagcagacaagtggtaccgtatgggtctgcgcaccctcgaggatgttcgttccagcaagaccctgaagttgaccccgtggcagaaagtaggtctgctgtattatgaagatcttgctcgcggcgttacgcgtgccgaagctgacgcgatttggctgctggttcaggatgcagtcgcaactttcgacccggatgcgatcgtggagattgtcggtggacagcgtcgtgggaaacctcagggtcacgacgttgatctgcttatcagttctccgggagctgaaaaagagcaagaagaccaactcctgcagaaagtgatgaatctgtggaagaaacaagggttgttgctgtgtggtcgtctggaatggggtcagtgggaatgggggggttcgccttccggtaaggctgatgagggtgacgcggaggcgtcgtgctttctgatcctcaaactttatgatcatctggtgcgtaaaagtaaacgcaatatgccgactggttcgaacatgggcgagtccaaaccgtggaaagcaattaaagtagatctgctgcgttgcccccgcggcagttttgcgtttgcgatgttgcagtggaccggaagccgcatgttccgtcgtgatctgcgctggtacgccctggaagagaagaacatgatgctggacaatcattcgctgtatgacatgactcgtggtatccaactccctgctaaatcggaagaggaaattttcgaacatctggggcttgaatacctggaaccgttcgaacgtaacgca

SEQ ID NO: 4770 - protein, 528 aa, synthetic construct
  REGION 1..528: note = Variant of terminal deoxynucleotidyltransferase
MHHHHHGGSGSHGIRTIDSDFGKKQQKKGDNHDSSATYEIKFHEFVLFILEEKMGATRRTFLTDLARKKGFRVENELTDEVTHIVAENLSRSEVLAWLKEHKMEKTKQFELLDISWLIESMKVGKPVDTKGKYQLAESVEVSANPDPTEGRVNELPPTMKTVSPYACQRRTTLNNRNQRFTDSLEILRENYELKGNDDTALEFRRAISVLKSLPFEVRSLKDTEGLPWISDEVKGIMEEIIEVGESREVQAVLNDEWYQSFHAFTRVFGVGVKTADKWYRMGLRTLEDVRSSKTLKLTPWQKVGLLYYEDLARGVTRAEADAIWLLVQDAVATFDPDAIVEIVGGQRRGKPQGHDVDLLISSPGAEKEQEDQLLQKVMNLWKKQGLLLCGRLEWGQWEWGGSPSGKADEGDAEASCFLILKLYDHLVRKSKRNMPTGSNMGESKPWKAIKVDLLRCPRGSFAFAMLQWTGSRMFRRDLRWYALEEKNMMLDNHSLYDMTRGIQLPAKSEEEIFEHLGLEYLEPFERNA

SEQ ID NO: 4771 - DNA, 1584 bp, synthetic construct
  misc_feature 1..1584: note = Variant of terminal deoxynucleotidyltransferase
  source 1..1584: mol_type = other DNA
atgcaccatcatcatcatggcggtagcggcagccacggcattcgtaccatcgattcggacttcgggaagaaacagcagaaaaaaggcgataaccacgatagttccgccacttatgaaatcaaatttcacgagtttgtgctgttcattctcgaagaaaaaatgggtgcgacgcgtcgtacttttctgacagatttagcccgcaagaaagggttccgcgtcgagaatgaactgaccgacgaagttacccacatcgtggcagaaaatctgtcacgctctgaagtattggcttggctgaaagaacacaagatggagaagaccaagcaattcgaactgctggatattagctggcttatcgaaagcatgaaagttggtaaaccggtggacaccaaggggaaataccagttggcggaatcggttgaggtgagtgcgaacccagatccgacagaaggtcgtgtaaacgagctgcctcctactatgaaaaccgtttctccgtatgcgtgtcaacgccgcaccaccctgaacaaccgtaatcaacgttttacggactcgctggagattcttcgtgaaatgtacgagtttaaaggcaacgacgatactgcgctggaatttcgtcgtgctatctccgtgctgaaaagccttccgtttgaggtacgtagcctgaaagacacggaaggattgccctggatcagtgatgaagtcaaagggattatggaagaaatcatcgaagtcggggagtcgcgtgaagtgcaggccgtgctcaatgatgagtggtatcaaagcttccacgcatttacgcgtgtctttggagtgggggtgaagacagcagacaagtggtaccgtatgggtctgcgcaccctcgaggatgttcgttccagcaagaccctgaagttgaccccgtggcagaaagtaggtctgctgtattatgaagatcttgctcgcggcgttacgcgtgccgaagctgacgcgatttggctgctggttcaggatgcagtcgcaactttcgacccggatgcgatcgtggagattgtcggtggacagcgtcgtgggaaacctcagggtcacgacgttgatctgcttatcagttctccgggagctgaaaaagagcaagaagaccaactcctgcagaaagtgatgaatctgtggaagaaacaagggttgttgctgtgtggtcgtctggaatggagtcagtgggaatgggggggttcgccttccggtaaggctgatgagggtgacgcggaggcgtcgtgctttctgatcctcaaactttatgatcatctggtgcgtaaaagtaaacgcaatatgccgactggttcgaacatgggcgagtccaaaccgtggaaagcaattaaagtagatctgctgcgttgcccccgcggcagttttgcgtttgcgatgttgcagtggaccggaagccgcatgttccgtcgtgatctgcgctggtacgccctggaagagaagaacatgatgctggacaatcattcgctgtatgacatgactcgtggtatccaactccctgctaaatcggaagaggaaattttcgaacatctggggcttgaatacctggaaccgttcgaacgtaacgca

SEQ ID NO: 4772 - protein, 528 aa, synthetic construct
  REGION 1..528: note = Variant of terminal deoxynucleotidyltransferase
MHHHHHGGSGSHGIRTIDSDFGKKQQKKGDNHDSSATYEIKFHEFVLFILEEKMGATRRTFLTDLARKKGFRVENELTDEVTHIVAENLSRSEVLAWLKEHKMEKTKQFELLDISWLIESMKVGKPVDTKGKYQLAESVEVSANPDPTEGRVNELPPTMKTVSPYACQRRTTLNNRNQRFTDSLEILREMYEFKGNDDTALEFRRAISVLKSLPFEVRSLKDTEGLPWISDEVKGIMEEIIEVGESREVQAVLNDEWYQSFHAFTRVFGVGVKTADKWYRMGLRTLEDVRSSKTLKLTPWQKVGLLYYEDLARGVTRAEADAIWLLVQDAVATFDPDAIVEIVGGQRRGKPQGHDVDLLISSPGAEKEQEDQLLQKVMNLWKKQGLLLCGRLEWSQWEWGGSPSGKADEGDAEASCFLILKLYDHLVRKSKRNMPTGSNMGESKPWKAIKVDLLRCPRGSFAFAMLQWTGSRMFRRDLRWYALEEKNMMLDNHSLYDMTRGIQLPAKSEEEIFEHLGLEYLEPFERNA

SEQ ID NO: 4773 - DNA, 1584 bp, synthetic construct
  misc_feature 1..1584: note = Variant of terminal deoxynucleotidyltransferase
  source 1..1584: mol_type = other DNA
atgcaccatcatcatcatggcggtagcggcagccacggcattcgtaccatcgattcggacttcgggaagaaacagcagaaaaaaggcgataaccacgatagttccgccacttatgaaatcaaatttcacgagtttgtgctgttcattctcgaagaaaaaatgggtgcgacgcgtcgtacttttctgacagatttagcccgcaagaaagggttccgcgtcgagaatgaactgaccgacgaagttacccacatcgtggcagaaaatctgtcacgctctgaagtattggcttggctgaaagaacacaagatggagaagaccaagcaattcgaactgctggatattagctggcttatcgaaagcatgaaagttggtaaaccggtggacaccaaggggaaataccagttggcggaatcggttgaggtgagtgcgaacccagatccgacagaaggtcgtgtaaacgagctgcctcctactatgaaaaccgtttctccgtatgcgtgtcaacgccgcaccaccctgaacaaccgtaatcaacgttttacggactcgctggagattcttcgtgaaaattacgagctgaaaggcaacgacgatactgcgctggaatttcgtcgtgctatctccgtgctgaaaagccttccgtttgaggtacgtagcctgaaagacacggaaggattgccctggatcagtgatgaagtcaaagggattatggaagaaatcatcgaagtcggggagtcgcgtgaagtgcaggccgtgctcaatgatgagtggtatcaaagcttccacgcatttacgcgtgtctttggagtgggggtgaagacagcagacaagtggtaccgtatgggtctgcgcaccctcgaggatattcgttccagcaagaccctgaagttgaccccgtggcagaaagtaggtctgctgtattatgaagatcttgctcgcggcgttacgcgtgccgaagctgacgcgatttggctgctggttcaggatgcagtcgcaactttcgacccggatgcgatcgtggagattgtcggtggacagcgtcgtgggaaacctcagggtcacgacgttgatctgcttatcagttctccgggagctgaaaaagagcaagaagaccaactcctgcagaaagtgatgaatctgtggaagaaacaagggttgttgctgtgtggtcgtctggaatggagtcagtgggaatgggggggttcgccttccggtaaggctgatgagggtgacgcggaggcgtcgtgctttctgatcctcaaactttatgatcatctggtgcgtaaaagtaaacgcaatatgccgactggttcgaacatgggcgagtccaaaccgtggaaagcaattaaagtagatctgctgcgttgcccccgcggcagttttgcgtttgcgatgttgcagtggaccggaagccgcatgttccgtcgtgatctgcgctggtacgccctggaagagaagaacatgatgctggacaatcattcgctgtatgacatgactcgtggtatccaactccctgctaaatcggaagaggaaattttcgaacatctggggcttgaatacctggaaccgttcgaacgtaacgca

SEQ ID NO: 4774 - protein, 528 aa, synthetic construct
  REGION 1..528: note = Variant of terminal deoxynucleotidyltransferase
MHHHHHGGSGSHGIRTIDSDFGKKQQKKGDNHDSSATYEIKFHEFVLFILEEKMGATRRTFLTDLARKKGFRVENELTDEVTHIVAENLSRSEVLAWLKEHKMEKTKQFELLDISWLIESMKVGKPVDTKGKYQLAESVEVSANPDPTEGRVNELPPTMKTVSPYACQRRTTLNNRNQRFTDSLEILRENYELKGNDDTALEFRRAISVLKSLPFEVRSLKDTEGLPWISDEVKGIMEEIIEVGESREVQAVLNDEWYQSFHAFTRVFGVGVKTADKWYRMGLRTLEDIRSSKTLKLTPWQKVGLLYYEDLARGVTRAEADAIWLLVQDAVATFDPDAIVEIVGGQRRGKPQGHDVDLLISSPGAEKEQEDQLLQKVMNLWKKQGLLLCGRLEWSQWEWGGSPSGKADEGDAEASCFLILKLYDHLVRKSKRNMPTGSNMGESKPWKAIKVDLLRCPRGSFAFAMLQWTGSRMFRRDLRWYALEEKNMMLDNHSLYDMTRGIQLPAKSEEEIFEHLGLEYLEPFERNA

SEQ ID NO: 4775 - DNA, 1584 bp, synthetic construct
  misc_feature 1..1584: note = Variant of terminal deoxynucleotidyltransferase
  source 1..1584: mol_type = other DNA
atgcaccatcatcatcatggcggtagcggcagccacggcattcgtaccatcgattcggacttcgggaagaaacagcagaaaaaaggcgataaccacgatagttccgccacttatgaaatcaaatttcacgagtttgtgctgttcattctcgaagaaaaaatgggtgcgacgcgtcgtacttttctgacagatttagcccgcaagaaagggttccgcgtcgagaatgaactgaccgacgaagttacccacatcgtggcagaaaatctgtcacgctctgaagtattggcttggctgaaagaacacaagatggagaagaccaagcaattcgaactgctggatattagctggcttatcgaaagcatgaaagttggtaaaccggtggacaccaaggggaaataccagttggcggaatcggttgaggtgagtgcgaacccagatccgacagaaggtcgtgtaaacgagctgcctcctactatgaaaaccgtttctccgtatgcgtgtcaacgccgcaccaccctgaacaaccgtaatcaacgttttacggactcgctggagattcttcgtgaaaattacgagctgaaaggcaacgacgatactgcgctggaatttcgtcgtgctatctccgtgctgaaaagccttccgtttgaggtacgtagcctgaaagacacggaaggattgccctggatcagtgatgaagtcaaagggattatggaagaaatcatcgaagtcggggagtcgcgtgaagtgcaggccgtgctcaatgatgagtggtatcaaagcttccacgcatttacgcgtgtctttggagtgggggtgaagacagcagacaagtggtaccgtatgggtctgcgcaccctcgaggatgttcgttccagcaagaccctgaagttgaccccgtggcagaaagtaggtctgctgtattatgaagatcttgctcgcggcgttacgcgtatggaagctgacgcgatttggctgctggttcaggatgcagtcgcaactttcgacccggatgcgatcgtggagattgtcggtggacagcgtcgtgggaaacctcagggtcacgacgttgatctgcttatcagttctccgggagctgaaaaagagcaagaagaccaactcctgcagaaagtgatgaatctgtggaagaaacaagggttgttgctgtgtggtcgtctggaatggagtcagtgggaatgggggggttcgccttccggtaaggctgatgagggtgacgcggaggcgtcgtgctttctgatcctcaaactttatgatcatctggtgcgtaaaagtaaacgcaatatgccgactggttcgaacatgggcgagtccaaaccgtggaaagcaattaaagtagatctgctgcgttgcccccgcggcagttttgcgtttgcgatgttgcagtggaccggaagccgcatgttccgtcgtgatctgcgctggtacgccctggaagagaagaacatgatgctggacaatcattcgctgtatgacatgactcgtggtatccaactccctgctaaatcggaagaggaaattttcgaacatctggggcttgaatacctggaaccgttcgaacgtaacgca

SEQ ID NO: 4776 - protein, 528 aa, synthetic construct
  REGION 1..528: note = Variant of terminal deoxynucleotidyltransferase
MHHHHHGGSGSHGIRTIDSDFGKKQQKKGDNHDSSATYEIKFHEFVLFILEEKMGATRRTFLTDLARKKGFRVENELTDEVTHIVAENLSRSEVLAWLKEHKMEKTKQFELLDISWLIESMKVGKPVDTKGKYQLAESVEVSANPDPTEGRVNELPPTMKTVSPYACQRRTTLNNRNQRFTDSLEILRENYELKGNDDTALEFRRAISVLKSLPFEVRSLKDTEGLPWISDEVKGIMEEIIEVGESREVQAVLNDEWYQSFHAFTRVFGVGVKTADKWYRMGLRTLEDVRSSKTLKLTPWQKVGLLYYEDLARGVTRMEADAIWLLVQDAVATFDPDAIVEIVGGQRRGKPQGHDVDLLISSPGAEKEQEDQLLQKVMNLWKKQGLLLCGRLEWSQWEWGGSPSGKADEGDAEASCFLILKLYDHLVRKSKRNMPTGSNMGESKPWKAIKVDLLRCPRGSFAFAMLQWTGSRMFRRDLRWYALEEKNMMLDNHSLYDMTRGIQLPAKSEEEIFEHLGLEYLEPFERNA

SEQ ID NO: 4777 - DNA, 1584 bp, synthetic construct
  misc_feature 1..1584: note = Variant of terminal deoxynucleotidyltransferase
  source 1..1584: mol_type = other DNA
atgcaccatcatcatcatggcggtagcggcagccacggcattcgtaccatcgattcggacttcgggaagaaacagcagaaaaaaggcgataaccacgatagttccgccacttatgaaatcaaatttcacgagtttgtgctgttcattctcgaagaaaaaatgggtgcgacgcgtcgtacttttctgacagatttagcccgcaagaaagggttccgcgtcgagaatgaactgaccgacgaagttacccacatcgtggcagaaaatctgtcacgctctgaagtattggcttggctgaaagaacacaagatggagaagaccaagcaattcgaactgctggatattagctggcttatcgaaagcatgaaagttggtaaaccggtggacaccaaggggaaataccagttggcggaatcggttgaggtgagtgcgaacccagatccgacagaaggtcgtgtaaacgagctgcctcctactatgaaaaccgtttctccgtatgcgtgtcaacgccgcaccaccctgaacaaccgtaatcaacgttttacggactcgctggagattcttcgtgaaaattacgagctgaaaggcaacgacgatactgcgctggaatttcgtcgtgctatctccgtgctgaaaagccttccgtttgaggtacgtagcctgaaagacacggaaggattgccctggatcagtgatgaagtcaaagggattatggaagaaatcatcgaagtcggggagtcgcgtgaagtgcaggccgtgctcaatgatgagaggtatcaaagcttccacgcatttacgcgtgtctttggagtgggggtgaagacagcagacaagtggtaccgtatgggtctgcgcaccctcgaggatgttcgttccagcaagaccctgaagttgaccccgtggcagaaagtaggtctgctgtattatgaagatcttgctcgcggcgttacgcgtgccgaagctgacgcgatttggctgctggttcaggatgcagtcgcaactttcgacccggatgcgatcgtggagattgtcggtggacagcgtcgtgggaaacctcagggtcacgacgttgatctgcttatcagttctccgggagctgaaaaagagcaagaagaccaactcctgcagaaagtgatgaatctgtggaagaaacaagggttgttgctgtgtggtcgtctggaatggagtcagtgggaatgggggggttcgccttccggtaaggctgatgagggtgacgcggaggcgtcgtgctttctgatcctcaaactttatgatcatctggtgcgtaaaagtaaacgcaatatgccgactggttcgaacatgggcgagtccaaaccgtggaaagcaattaaagtagatctgctgcgttgcccccgcggcagttttgcgtttgcgatgttgcagtggaccggaagccgcatgttccgtcgtgatctgcgctggtacgccctggaagagaagaacatgatgctggacaatcattcgctgtatgacatgactcgtggtatccaactccctgctaaatcggaagaggaaattttcgaacatctggggcttgaatacctggaaccgttcgaacgtaacgca

SEQ ID NO: 4778 - protein, 528 aa, synthetic construct
  REGION 1..528: note = Variant of terminal deoxynucleotidyltransferase
MHHHHHGGSGSHGIRTIDSDFGKKQQKKGDNHDSSATYEIKFHEFVLFILEEKMGATRRTFLTDLARKKGFRVENELTDEVTHIVAENLSRSEVLAWLKEHKMEKTKQFELLDISWLIESMKVGKPVDTKGKYQLAESVEVSANPDPTEGRVNELPPTMKTVSPYACQRRTTLNNRNQRFTDSLEILRENYELKGNDDTALEFRRAISVLKSLPFEVRSLKDTEGLPWISDEVKGIMEEIIEVGESREVQAVLNDERYQSFHAFTRVFGVGVKTADKWYRMGLRTLEDVRSSKTLKLTPWQKVGLLYYEDLARGVTRAEADAIWLLVQDAVATFDPDAIVEIVGGQRRGKPQGHDVDLLISSPGAEKEQEDQLLQKVMNLWKKQGLLLCGRLEWSQWEWGGSPSGKADEGDAEASCFLILKLYDHLVRKSKRNMPTGSNMGESKPWKAIKVDLLRCPRGSFAFAMLQWTGSRMFRRDLRWYALEEKNMMLDNHSLYDMTRGIQLPAKSEEEIFEHLGLEYLEPFERNA

SEQ ID NO: 4779 - DNA, 1584 bp, synthetic construct
  misc_feature 1..1584: note = Variant of terminal deoxynucleotidyltransferase
  source 1..1584: mol_type = other DNA
atgcaccatcatcatcatggcggtagcggcagccacggcattcgtaccatcgattcggacttcgggaagaaacagcagaaaaaaggcgataaccacgatagttccgccacttatgaaatcaaatttcacgagtttgtgctgttcattctcgaagaaaaaatgggtgcgacgcgtcgtacttttctgacagatttagcccgcaagaaagggttccgcgtcgagaatgaactgaccgacgaagttacccacatcgtggcagaaaatctgtcacgctctgaagtattggcttggctgaaagaacacaagatggagaagaccaagcaattcgaactgctggatattagctggcttatcgaaagcatgaaagttggtaaaccggtggacaccaaggggaaataccagttggcggaatcggttgaggtgagtgcgaacccagatccgacagaaggtcgtgtaaacgagctgcctcctactatgaaaaccgtttctccgtatgcgtgtcaacgccgcaccaccctgaacaaccgtaatcaacgttttacggactcgctggagattcttcgtgaaaattacgagctgaaaggcaacgacgatactgcgctggaatttcgtcgtgctatctccgtgctgaaaagccttccgtttgaggtacgtagcctgaaagacacggaaggattgccctggatcagtgatgaagtcaaagggattatggaagaaatcatcgaagtcggggagtcgcgtgaagtgcaggccgtgctcaatgatgagtggtatcaaagcttccacgcatttacgcgtgtctttggagtgggggtgaagacagcagacaagtggtaccgtatgggtctgcgcaccctcgaggatgttcgttccagcaagaccctgaagttgaccccgtggcagaaagtaggtctgctgtattatgaagatcttgctcgcggcgttacgcgtgccgaagctgacgcgatttggctgctggttcaggatgcagtcgcaactttcgacccggatgcgatcgtggagattgtcggtggacagcgtcgtgggaaacctcagggtcacgacgttgatctgcttatcagttctccgggagctgaaaaagagcaagaagaccaactcctgcagaaagtgatgaatctgtggaagaaacaagggttgttgctgtgtggtcgtctggaatggagtcagtgggaatgggggggttcgccttccggtaaggctgatgagggtgacgcggaggcgtcgtgctttctgatcctcaaactttatgatcatctggtgcgtaaaagtaaacgcaatatgccgactggttcgaacatgggcgagtccaaaccgtggaaagcaattaaagtagatctgctgcgttgcccccgcggcagttttgcgtttgcgatgttgcagtggaccggaagccgcatgttccgtcgtgatctgcgcgattacgccctggaagagaagaacatgatgctggacaatcattcgctgtatgacatgactcgtggtatccaactccctgctaaatcggaagaggaaattttcgaacatctggggcttgaatacctggaaccgttcgaacgtaacgca

SEQ ID NO: 4780 - protein, 528 aa, synthetic construct
  REGION 1..528: note = Variant of terminal deoxynucleotidyltransferase
MHHHHHGGSGSHGIRTIDSDFGKKQQKKGDNHDSSATYEIKFHEFVLFILEEKMGATRRTFLTDLARKKGFRVENELTDEVTHIVAENLSRSEVLAWLKEHKMEKTKQFELLDISWLIESMKVGKPVDTKGKYQLAESVEVSANPDPTEGRVNELPPTMKTVSPYACQRRTTLNNRNQRFTDSLEILRENYELKGNDDTALEFRRAISVLKSLPFEVRSLKDTEGLPWISDEVKGIMEEIIEVGESREVQAVLNDEWYQSFHAFTRVFGVGVKTADKWYRMGLRTLEDVRSSKTLKLTPWQKVGLLYYEDLARGVTRAEADAIWLLVQDAVATFDPDAIVEIVGGQRRGKPQGHDVDLLISSPGAEKEQEDQLLQKVMNLWKKQGLLLCGRLEWSQWEWGGSPSGKADEGDAEASCFLILKLYDHLVRKSKRNMPTGSNMGESKPWKAIKVDLLRCPRGSFAFAMLQWTGSRMFRRDLRDYALEEKNMMLDNHSLYDMTRGIQLPAKSEEEIFEHLGLEYLEPFERNA

SEQ ID NO: 4781 - DNA, 1584 bp, synthetic construct
  misc_feature 1..1584: note = Variant of terminal deoxynucleotidyltransferase
  source 1..1584: mol_type = other DNA
atgcaccatcatcatcatggcggtagcggcagccacggcattcgtaccatcgattcggacttcgggaagaaacagcagaaaaaaggcgataaccacgatagttccgccacttatgaaatcaaatttcacgagtttgtgctgttcattctcgaagaaaaaatgggtgcgacgcgtcgtacttttctgacagatttagcccgcaagaaagggttccgcgtcgagaatgaactgaccgacgaagttacccacatcgtggcagaaaatctgtcacgctctgaagtattggcttggctgaaagaacacaagatggagaagaccaagcaattcgaactgctggatattagctggcttatcgaaagcatgaaagttggtaaaccggtggacaccaaggggaaataccagttggcggaatcggttgaggtgagtgcgaacccagatccgacagaaggtcgtgtaaacgagctgcctcctactatgaaaaccgtttctccgtatgcgtgtcaacgccgcaccaccctgaacaaccgtaatcaacgttttacggactcgctggagattcttcgtgaaaattacgagctgaaaggcaacgacgatactgcgctggaatttcgtcgtgctatctccgtgctgaaaagccttccgtttgaggtacgtagcctgaaagacacggaaggattgccctggatcagtgatgaagtcaaagggattatggaagaaatcatcgaagtcggggagtcgcgtgaagtgcaggccgtgctcaatgatgagtggtatcaaagcttccacgcatttacgcgtgtctttggagtgggggtgaagacagcagacaagtggtaccgtatgggtctgcgcaccctcgaggatgttcgttccagcaagaccctgaagttgaccccgtggcagaaagtaggtctgctgtattatgaagatcttgtgcgcggcgttacgcgtgccgaagctgacgcgatttggctgctggttcaggatgcagtcgcaactttcgacccggatgcgatcgtggagattgtcggtggacagcgtcgtgggaaacctcagggtcacgacgttgatctgcttatcagttctccgggagctgaaaaagagcaagaagaccaactcctgcagaaagtgatgaatctgtggaagaaacaagggttgttgctgtgtggtcgtctggaatggagtcagtgggaatgggggggttcgccttccggtaaggctgatgagggtgacgcggaggcgtcgtgctttctgatcctcaaactttatgatcatctggtgcgtaaaagtaaacgcaatatgccgactggttcgaacatgggcgagtccaaaccgtggaaagcaattaaagtagatctgctgcgttgcccccgcggcagttttgcgtttgcgatgttgcagtggaccggaagccgcatgttccgtcgtgatctgcgctggtacgccctggaagagaagaacatgatgctggacaatcattcgctgtatgacatgactcgtggtatccaactccctgctaaatcggaagaggaaattttcgaacatctggggcttgaatacctggaaccgttcgaacgtaacgca

SEQ ID NO: 4782 - protein, 528 aa, synthetic construct
  REGION 1..528: note = Variant of terminal deoxynucleotidyltransferase
MHHHHHGGSGSHGIRTIDSDFGKKQQKKGDNHDSSATYEIKFHEFVLFILEEKMGATRRTFLTDLARKKGFRVENELTDEVTHIVAENLSRSEVLAWLKEHKMEKTKQFELLDISWLIESMKVGKPVDTKGKYQLAESVEVSANPDPTEGRVNELPPTMKTVSPYACQRRTTLNNRNQRFTDSLEILRENYELKGNDDTALEFRRAISVLKSLPFEVRSLKDTEGLPWISDEVKGIMEEIIEVGESREVQAVLNDEWYQSFHAFTRVFGVGVKTADKWYRMGLRTLEDVRSSKTLKLTPWQKVGLLYYEDLVRGVTRAEADAIWLLVQDAVATFDPDAIVEIVGGQRRGKPQGHDVDLLISSPGAEKEQEDQLLQKVMNLWKKQGLLLCGRLEWSQWEWGGSPSGKADEGDAEASCFLILKLYDHLVRKSKRNMPTGSNMGESKPWKAIKVDLLRCPRGSFAFAMLQWTGSRMFRRDLRWYALEEKNMMLDNHSLYDMTRGIQLPAKSEEEIFEHLGLEYLEPFERNA

SEQ ID NO: 4783 - DNA, 1584 bp, synthetic construct
  misc_feature 1..1584: note = Variant of terminal deoxynucleotidyltransferase
  source 1..1584: mol_type = other DNA
atgcaccatcatcatcatggcggtagcggcagccacggcattcgtaccatcgattcggacttcgggaagaaacagcagaaaaaaggcgataaccacgatagttccgccacttatgaaatcaaatttcacgagtttgtgctgttcattctcgaagaaaaaatgggtgcgacgcgtcgtacttttctgacagatttagcccgcaagaaagggttccgcgtcgagaatgaactgaccgacgaagttacccacatcgtggcagaaaatctgtcacgctctgaagtattggcttggctgaaagaacacaagatggagaagaccaagcaattcgaactgctggatattagctggcttatcgaaagcatgaaagttggtaaaccggtggacaccaaggggaaataccagttggcggaatcggttgaggtgagtgcgaacccagatccgacagaaggtcgtgtaaacgagctgcctcctactatgaaaaccgtttctccgtatgcgtgtcaacgccgcaccaccctgaacaaccgtaatcaacgttttacggactcgctggagattcttcgtgaaaattacgagctgaaaggcaacgacgatactgcgctggaatttcgtcgtgctatctccgtgctgaaaagccttccgtttgaggtacgtagcctgaaagacacggaaggattgccctggatcagtgatgaagtcaaagggattatggaagaaatcatcgaagtcggggagtcgcgtgaagtgcaggccgtgctcaatgatgagtggtatcaaagcttccacgcatttacgcgtgtctttggagtgggggtgaagacagcagacaagtggtaccgtatgggtctgcgcaccctcgaggatgttcgttccagcaagaccctgaagttgaccccgtggcagaaagtaggtctgctgtattatgaagatcttgctcgcggcgttacgcgtgccgaagctgacgcgatttggctgctggttcaggatgcagtcgcaactttcgacccggatgcgatcgtggagattgtcggtggacagcgtcgtgggaaacctcagggtcacgacgttgatctgcttatcagttctccgggagctgaaaaagagcaagaagaccaactcctgcagaaagtgatgaatctgtggaagaaacaagggttgttgctgtgtggtcgtctggaatggagtcagtgggaatgggggggttcgccttccggtaaggctgatgagggtgacgcggaggcgtcgtgctttctgatcctcaaactttatgatcatctggtgcgtaaaagtaaacgcaatatgccgactggttcgaacatgggcgagtccaaaccgtggaaagcaattaaagtagatctgctgcgttgcccccgcggcagttttgcgtttgcgatgttgcagtggaccggaagccgcatgttccgtcgtgatctgcgcgagtacgccctggaagagaagaacatgatgctggacaatcattcgctgtatgacatgactcgtggtatccaactccctgctaaatcggaagaggaaattttcgaacatctggggcttgaatacctggaaccgttcgaacgtaacgca

SEQ ID NO: 4784 - protein, 528 aa, synthetic construct
  REGION 1..528: note = Variant of terminal deoxynucleotidyltransferase
MHHHHHGGSGSHGIRTIDSDFGKKQQKKGDNHDSSATYEIKFHEFVLFILEEKMGATRRTFLTDLARKKGFRVENELTDEVTHIVAENLSRSEVLAWLKEHKMEKTKQFELLDISWLIESMKVGKPVDTKGKYQLAESVEVSANPDPTEGRVNELPPTMKTVSPYACQRRTTLNNRNQRFTDSLEILRENYELKGNDDTALEFRRAISVLKSLPFEVRSLKDTEGLPWISDEVKGIMEEIIEVGESREVQAVLNDEWYQSFHAFTRVFGVGVKTADKWYRMGLRTLEDVRSSKTLKLTPWQKVGLLYYEDLARGVTRAEADAIWLLVQDAVATFDPDAIVEIVGGQRRGKPQGHDVDLLISSPGAEKEQEDQLLQKVMNLWKKQGLLLCGRLEWSQWEWGGSPSGKADEGDAEASCFLILKLYDHLVRKSKRNMPTGSNMGESKPWKAIKVDLLRCPRGSFAFAMLQWTGSRMFRRDLREYALEEKNMMLDNHSLYDMTRGIQLPAKSEEEIFEHLGLEYLEPFERNA

SEQ ID NO: 4785 - DNA, 1584 bp, synthetic construct
  misc_feature 1..1584: note = Variant of terminal deoxynucleotidyltransferase
  source 1..1584: mol_type = other DNA
atgcaccatcatcatcatggcggtagcggcagccacggcattcgtaccatcgattcggacttcgggaagaaacagcagaaaaaaggcgataaccacgatagttccgccacttatgaaatcaaatttcacgagtttgtgctgttcattctcgaagaaaaaatgggtgcgacgcgtcgtacttttctgacagatttagcccgcaagaaagggttccgcgtcgagaatgaactgaccgacgaagttacccacatcgtggcagaaaatctgtcacgctctgaagtattggcttggctgaaagaacacaagatggagaagaccaagcaattcgaactgctggatattagctggcttatcgaaagcatgaaagttggtaaaccggtggacaccaaggggaaataccagttggcggaatcggttgaggtgagtgcgaacccagatccgacagaaggtcgtgtaaacgagctgcctcctactatgaaaaccgtttctccgtatgcgtgtcaacgccgcaccaccctgaacaaccgtaatcaacgttttacggactcgctggagattcttcgtgaaaattacgagctgaaaggcaacgacgatactgcgctggaatttcgtcgtgctatctccgtgctgaaaagccttccgtttgaggtacgtagcctgaaagacacggaaggattgccctggatcagtgatgaagtcaaagggattatggaagaaatcatcgaagtcggggagtcgcgtgaagtgcaggccgtgctcaatgatgagtggtatcaaagcttccacgcatttacgcgtgtctttggagtgggggtgaagacagcagacaagtggtaccgtatgggtctgcgcaccctcgaggatgttcgttccagcaagaccctgaagttgaccccgtggcagaaagtaggtctgctgtattatgaagatcttgctcgcggcgttacgcgtgccgaagctgacgcgatttggctgctggttcaggatgcagtcgcaactttcgacccggatgcgatcgtggagattgtcggtggacagcgtcgtgggaaacctcagggtcacgacgttgatctgcttatcagttctccgggagctgaaaaagagcaagaagaccaactcctgcagaaagtgatgaatctgtggaagaaacaagggttgttgctgtgtggtcgtctggaatggagtcagtgggaatgggggggttcgccttccggtaaggctgatgagggtgacgcggaggcgtcgtgctttctgatcctcaaactttatgatcatctggtgcgtaaaagtaaacgcaatatgccgactggttcgaacatgggcgagtccaaaccgtggaaagcaattaaagtagatctgctgcgttgcccccgcggcagttttgcgtttgcgatgttgcagtggaccggaagccgcatgttccgttgggatctgcgcgattacgccctggaagagaagaacatgatgctggacaatcattcgctgtatgacatgactcgtggtatccaactccctgctaaatcggaagaggaaattttcgaacatctggggcttgaatacctggaaccgttcgaacgtaacgca

SEQ ID NO: 4786 - protein, 528 aa, synthetic construct
  REGION 1..528: note = Variant of terminal deoxynucleotidyltransferase
MHHHHHGGSGSHGIRTIDSDFGKKQQKKGDNHDSSATYEIKFHEFVLFILEEKMGATRRTFLTDLARKKGFRVENELTDEVTHIVAENLSRSEVLAWLKEHKMEKTKQFELLDISWLIESMKVGKPVDTKGKYQLAESVEVSANPDPTEGRVNELPPTMKTVSPYACQRRTTLNNRNQRFTDSLEILRENYELKGNDDTALEFRRAISVLKSLPFEVRSLKDTEGLPWISDEVKGIMEEIIEVGESREVQAVLNDEWYQSFHAFTRVFGVGVKTADKWYRMGLRTLEDVRSSKTLKLTPWQKVGLLYYEDLARGVTRAEADAIWLLVQDAVATFDPDAIVEIVGGQRRGKPQGHDVDLLISSPGAEKEQEDQLLQKVMNLWKKQGLLLCGRLEWSQWEWGGSPSGKADEGDAEASCFLILKLYDHLVRKSKRNMPTGSNMGESKPWKAIKVDLLRCPRGSFAFAMLQWTGSRMFRWDLRDYALEEKNMMLDNHSLYDMTRGIQLPAKSEEEIFEHLGLEYLEPFERNA

SEQ ID NO: 4787 - DNA, 1584 bp, synthetic construct
  misc_feature 1..1584: note = Variant of terminal deoxynucleotidyltransferase
  source 1..1584: mol_type = other DNA
atgcaccatcatcatcatggcggtagcggcagccacggcattcgtaccatcgattcggacttcgggaagaaacagcagaaaaaaggcgataaccacgatagttccgccacttatgaaatcaaatttcacgagtttgtgctgttcattctcgaagaaaaaatgggtgcgacgcgtcgtacttttctgacagatttagcccgcaagaaagggttccgcgtcgagaatgaactgaccgacgaagttacccacatcgtggcagaaaatctgtcacgctctgaagtattggcttggctgaaagaacacaagatggagaagaccaagcaattcgaactgctggatattagctggcttatcgaaagcatgaaagttggtaaaccggtggacaccaaggggaaataccagttggcggaatcggttgaggtgagtgcgaacccagatccgacagaaggtcgtgtaaacgagctgcctcctactatgaaaaccgtttctccgtatgcgtgtcaacgccgcaccaccctgaacaaccgtaatcaacgttttacggactcgctggagattcttcgtgaaaattacgagctgaaaggcaacgacgatactgcgctggaatttcgtcgtgctatctccgtgctgaaaagccttccgtttgaggtacgtagcctgaaagacacggaaggattgccctggatcagtgatgaagtcaaagggattatggaagaaatcatcgaagtcggggagtcgcgtgaagtgcaggccgtgctcaatgatgagtggtatcaaagcttccacgcatttacgcgtgtctttggagtgggggtgaagacagcagacaagtggtaccgtatgggtctgcgcaccctcgaggatgttcgttccagcaagaccctgaagttgaccccgtggcagaaagtaggtctgctgtattatgaagatcttgctcgcggcgttacgcgtgccgaagctgacgcgatttggctgctggttcaggatgcagtcgcaactttcgacccggatgcgatcgtggagattgtcggtggacagcgtcgtgggaaacctcagggtcacgacgttgatctgcttatcagttctccgggagctgaaaaagagcaagaagaccaactcctgcagaaagtgatgaatctgtggaagaaacaagggttgttgctgtgtggtcgtctggaatggagtcagtgggaatgggggggttcgccttccggtaaggctgatgagggtgacgcggaggcgtcgtgctttctgatcctcaaactttatgatcatctggtgcgtaaaagtaaacgcaatatgccgactggttcgaacatgggcgagtccaaaccgtggaaagcaattaaagtagatctgctgcgttgcccccgcggcagttttgcgtttgcgatgttgcagtggaccggaagccgcatgttccgtcgtgatctgcgcgattgggccctggaagagaagaacatgatgctggacaatcattcgctgtatgacatgactcgtggtatccaactccctgctaaatcggaagaggaaattttcgaacatctggggcttgaatacctggaaccgttcgaacgtaacgca

SEQ ID NO: 4788 - protein, 528 aa, synthetic construct
  REGION 1..528: note = Variant of terminal deoxynucleotidyltransferase
MHHHHHGGSGSHGIRTIDSDFGKKQQKKGDNHDSSATYEIKFHEFVLFILEEKMGATRRTFLTDLARKKGFRVENELTDEVTHIVAENLSRSEVLAWLKEHKMEKTKQFELLDISWLIESMKVGKPVDTKGKYQLAESVEVSANPDPTEGRVNELPPTMKTVSPYACQRRTTLNNRNQRFTDSLEILRENYELKGNDDTALEFRRAISVLKSLPFEVRSLKDTEGLPWISDEVKGIMEEIIEVGESREVQAVLNDEWYQSFHAFTRVFGVGVKTADKWYRMGLRTLEDVRSSKTLKLTPWQKVGLLYYEDLARGVTRAEADAIWLLVQDAVATFDPDAIVEIVGGQRRGKPQGHDVDLLISSPGAEKEQEDQLLQKVMNLWKKQGLLLCGRLEWSQWEWGGSPSGKADEGDAEASCFLILKLYDHLVRKSKRNMPTGSNMGESKPWKAIKVDLLRCPRGSFAFAMLQWTGSRMFRRDLRDWALEEKNMMLDNHSLYDMTRGIQLPAKSEEEIFEHLGLEYLEPFERNA

SEQ ID NO: 4789 - DNA, 1584 bp, synthetic construct
  misc_feature 1..1584: note = Variant of terminal deoxynucleotidyltransferase
  source 1..1584: mol_type = other DNA
atgcaccatcatcatcatggcggtagcggcagccacggcattcgtaccatcgattcggacttcgggaagaaacagcagaaaaaaggcgataaccacgatagttccgccacttatgaaatcaaatttcacgagtttgtgctgttcattctcgaagaaaaaatgggtgcgacgcgtcgtacttttctgacagatttagcccgcaagaaagggttccgcgtcgagaatgaactgaccgacgaagttacccacatcgtggcagaaaatctgtcacgctctgaagtattggcttggctgaaagaacacaagatggagaagaccaagcaattcgaactgctggatattagctggcttatcgaaagcatgaaagttggtaaaccggtggacaccaaggggaaataccagttggcggaatcggttgaggtgagtgcgaacccagatccgacagaaggtcgtgtaaacgagctgcctcctactatgaaaaccgtttctccgtatgcgtgtcaacgccgcaccaccctgaacaaccgtaatcaacgttttacggactcgctggagattcttcgtgaaaattacgagctgaaaggcaacgacgatactgcgctggaatttcgtcgtgctatctccgtgctgaaaagccttccgtttgaggtacgtagcctgaaagacacggaaggattgccctggatcagtgatgaagtcaaagggattatggaagaaatcatcgaagtcggggagtcgcgtgaagtgcaggccgtgctcaatgatgagtggtatcaaagcttccacgcatttacgcgtgtctttggagtgggggtgaagacagcagacaagtggtaccgtatgggtctgcgcaccctcgaggatgttcgttccagcaagaccctgaagttgaccccgtggcagaaagtaggtctgacttattatgaagatcttgctcgcggcgttacgcgtgccgaagctgacgcgatttggctgctggttcaggatgcagtcgcaactttcgacccggatgcgatcgtggagattgtcggtggacagcgtcgtgggaaacctcagggtcacgacgttgatctgcttatcagttctccgggagctgaaaaagagcaagaagaccaactcctgcagaaagtgatgaatctgtggaagaaacaagggttgttgctgtgtggtcgtctggaatggagtcagtgggaatgggggggttcgccttccggtaaggctgatgagggtgacgcggaggcgtcgtgctttctgatcctcaaactttatgatcatctggtgcgtaaaagtaaacgcaatatgccgactggttcgaacatgggcgagtccaaaccgtggaaagcaattaaagtagatctgctgcgttgcccccgcggcagttttgcgtttgcgatgttgcagtggaccggaagccgcatgttccgtcgtgatctgcgctggtacgccctggaagagaagaacatgatgctggacaatcattcgctgtatgacatgactcgtggtatccaactccctgctaaatcggaagaggaaattttcgaacatctggggcttgaatacctggaaccgttcgaacgtaacgca

SEQ ID NO: 4790 - protein, 528 aa, synthetic construct
  REGION 1..528: note = Variant of terminal deoxynucleotidyltransferase
MHHHHHGGSGSHGIRTIDSDFGKKQQKKGDNHDSSATYEIKFHEFVLFILEEKMGATRRTFLTDLARKKGFRVENELTDEVTHIVAENLSRSEVLAWLKEHKMEKTKQFELLDISWLIESMKVGKPVDTKGKYQLAESVEVSANPDPTEGRVNELPPTMKTVSPYACQRRTTLNNRNQRFTDSLEILRENYELKGNDDTALEFRRAISVLKSLPFEVRSLKDTEGLPWISDEVKGIMEEIIEVGESREVQAVLNDEWYQSFHAFTRVFGVGVKTADKWYRMGLRTLEDVRSSKTLKLTPWQKVGLTYYEDLARGVTRAEADAIWLLVQDAVATFDPDAIVEIVGGQRRGKPQGHDVDLLISSPGAEKEQEDQLLQKVMNLWKKQGLLLCGRLEWSQWEWGGSPSGKADEGDAEASCFLILKLYDHLVRKSKRNMPTGSNMGESKPWKAIKVDLLRCPRGSFAFAMLQWTGSRMFRRDLRWYALEEKNMMLDNHSLYDMTRGIQLPAKSEEEIFEHLGLEYLEPFERNA

SEQ ID NO: 4791 - DNA, 1584 bp, synthetic construct
  misc_feature 1..1584: note = Variant of terminal deoxynucleotidyltransferase
  source 1..1584: mol_type = other DNA
atgcaccatcatcatcatggcggtagcggcagccacggcattcgtaccatcgattcggacttcgggaagaaacagcagaaaaaaggcgataaccacgatagttccgccacttatgaaatcaaatttcacgagtttgtgctgttcattctcgaagaaaaaatgggtgcgacgcgtcgtacttttctgacagatttagcccgcaagaaagggttccgcgtcgagaatgaactgaccgacgaagttacccacatcgtggcagaaaatctgtcacgctctgaagtattggcttggctgaaagaacacaagatggagaagaccaagcaattcgaactgctggatattagctggcttatcgaaagcatgaaagttggtaaaccggtggacaccaaggggaaataccagttggcggaatcggttgaggtgagtgcgaacccagatccgacagaaggtcgtgtaaacgagctgcctcctactatgaaaaccgtttctccgtatgcgtgtcaacgccgcaccaccctgaacaaccgtaatcaacgttttacggactcgctggagattcttcgtgaaaattacgagctgaaaggcaacgacgatactgcgctggaatttcgtcgtgctatctccgtgctgaaaagccttccgtttgaggtacgtagcctgaaagacacggaaggattgccctggatcagtgatgaagtcaaagggattatggaagaaatcatcgaagtcggggagtcgcgtgaagtgcaggccgtgctcaatgatgagtggtatcaaagcttccacgcatttacgcgtgtctttggagtgggggtgaagacagcagacaagtggtaccgtatgggtctgcgcaccctcgaggatgttcgttccagcaagaccctgaagttgaccccgtggcagaaagtaggtctgctgtattatgaagatcttgctcgcggcgttacgcgtgccgaagctgacgcgatttggctgctggttcaggatgcagtcgcaactttcgacccggatgcgatcgtggagattgtcggtggacagcgtcgtgggaaacctcagggtcacgacgttgatctgcttatcagttctccgggagctgaaaaagagcaagaagaccaactcctgcagaaagtgatgaatctgtggaagaaacaagggttgttgctgtgtggtcgtctggaatggagtcagtgggaatgggggggttcgccttccggtaaggctgatgagggtgacgcggaggagtcgtgctttctgatcctcaaactttatgatcatctggtgcgtaaaagtaaacgcaatatgccgactggttcgaacatgggcgagtccaaaccgtggaaagcaattaaagtagatctgctgcgttgcccccgcggcagttttgcgtttgcgatgttgcagtggaccggaagccgcatgttccgtcgtgatctgcgctggtacgccctggaagagaagaacatgatgctggacaatcattcgctgtatgacatgactcgtggtatccaactccctgctaaatcggaagaggaaattttcgaacatctggggcttgaatacctggaaccgttcgaacgtaacgca

SEQ ID NO: 4792 - protein, 528 aa, synthetic construct
  REGION 1..528: note = Variant of terminal deoxynucleotidyltransferase
MHHHHHGGSGSHGIRTIDSDFGKKQQKKGDNHDSSATYEIKFHEFVLFILEEKMGATRRTFLTDLARKKGFRVENELTDEVTHIVAENLSRSEVLAWLKEHKMEKTKQFELLDISWLIESMKVGKPVDTKGKYQLAESVEVSANPDPTEGRVNELPPTMKTVSPYACQRRTTLNNRNQRFTDSLEILRENYELKGNDDTALEFRRAISVLKSLPFEVRSLKDTEGLPWISDEVKGIMEEIIEVGESREVQAVLNDEWYQSFHAFTRVFGVGVKTADKWYRMGLRTLEDVRSSKTLKLTPWQKVGLLYYEDLARGVTRAEADAIWLLVQDAVATFDPDAIVEIVGGQRRGKPQGHDVDLLISSPGAEKEQEDQLLQKVMNLWKKQGLLLCGRLEWSQWEWGGSPSGKADEGDAEESCFLILKLYDHLVRKSKRNMPTGSNMGESKPWKAIKVDLLRCPRGSFAFAMLQWTGSRMFRRDLRWYALEEKNMMLDNHSLYDMTRGIQLPAKSEEEIFEHLGLEYLEPFERNA

SEQ ID NO: 4793 - DNA, 1584 bp, synthetic construct
  misc_feature 1..1584: note = Variant of terminal deoxynucleotidyltransferase
  source 1..1584: mol_type = other DNA
atgcaccatcatcatcatggcggtagcggcagccacggcattcgtaccatcgattcggacttcgggaagaaacagcagaaaaaaggcgataaccacgatagttccgccacttatgaaatcaaatttcacgagtttgtgctgttcattctcgaagaaaaaatgggtgcgacgcgtcgtacttttctgacagatttagcccgcaagaaagggttccgcgtcgagaatgaactgaccgacgaagttacccacatcgtggcagaaaatctgtcacgctctgaagtattggcttggctgaaagaacacaagatggagaagaccaagcaattcgaactgctggatattagctggcttatcgaaagcatgaaagttggtaaaccggtggacaccaaggggaaataccagttggcggaatcggttgaggtgagtgcgaacccagatccgacagaaggtcgtgtaaacgagctgcctcctactatgaaaaccgtttctccgtatgcgtgtcaacgccgcaccaccctgaacaaccgtaatcaacgttttacggactcgctggagattcttcgtgaaaattacgagctgaaaggcaacgacgatactgcgctggaatttcgtcgtgctatctccgtgctgaaaagccttccgtttgaggtacgtagcctgaaagacacggaaggattgccctggatcagtgatgaagtcaaagggattatggaagaaatcatcgaagtcggggagtcgcgtgaagtgcaggccgtgctcaatgatgagtggtataagagcttccacgcatttacgcgtgtctttggagtgggggtgaagacagcagacaagtggtaccgtatgggtctgcgcaccctcgaggatgttcgttccagcaagaccctgaagttgaccccgtggcagaaagtaggtctgctgtattatgaagatcttgctcgcggcgttacgcgtgccgaagctgacgcgatttggctgctggttcaggatgcagtcgcaactttcgacccggatgcgatcgtggagattgtcggtggacagcgtcgtgggaaacctcagggtcacgacgttgatctgcttatcagttctccgggagctgaaaaagagcaagaagaccaactcctgcagaaagtgatgaatctgtggaagaaacaagggttgttgctgtgtggtcgtctggaatggagtcagtgggaatgggggggttcgccttccggtaaggctgatgagggtgacgcggaggcgtcgtgctttctgatcctcaaactttatgatcatctggtgcgtaaaagtaaacgcaatatgccgactggttcgaacatgggcgagtccaaaccgtggaaagcaattaaagtagatctgctgcgttgcccccgcggcagttttgcgtttgcgatgttgcagtggaccggaagccgcatgttccgtcgtgatctgcgctggtacgccctggaagagaagaacatgatgctggacaatcattcgctgtatgacatgactcgtggtatccaactccctgctaaatcggaagaggaaattttcgaacatctggggcttgaatacctggaaccgttcgaacgtaacgca

SEQ ID NO: 4794 - protein, 528 aa, synthetic construct
  REGION 1..528: note = Variant of terminal deoxynucleotidyltransferase
MHHHHHGGSGSHGIRTIDSDFGKKQQKKGDNHDSSATYEIKFHEFVLFILEEKMGATRRTFLTDLARKKGFRVENELTDEVTHIVAENLSRSEVLAWLKEHKMEKTKQFELLDISWLIESMKVGKPVDTKGKYQLAESVEVSANPDPTEGRVNELPPTMKTVSPYACQRRTTLNNRNQRFTDSLEILRENYELKGNDDTALEFRRAISVLKSLPFEVRSLKDTEGLPWISDEVKGIMEEIIEVGESREVQAVLNDEWYKSFHAFTRVFGVGVKTADKWYRMGLRTLEDVRSSKTLKLTPWQKVGLLYYEDLARGVTRAEADAIWLLVQDAVATFDPDAIVEIVGGQRRGKPQGHDVDLLISSPGAEKEQEDQLLQKVMNLWKKQGLLLCGRLEWSQWEWGGSPSGKADEGDAEASCFLILKLYDHLVRKSKRNMPTGSNMGESKPWKAIKVDLLRCPRGSFAFAMLQWTGSRMFRRDLRWYALEEKNMMLDNHSLYDMTRGIQLPAKSEEEIFEHLGLEYLEPFERNA

SEQ ID NO: 4795 - DNA, 1584 bp, synthetic construct
  misc_feature 1..1584: note = Variant of terminal deoxynucleotidyltransferase
  source 1..1584: mol_type = other DNA
atgcaccatcatcatcatggcggtagcggcagccacggcattcgtaccatcgattcggacttcgggaagaaacagcagaaaaaaggcgataaccacgatagttccgccacttatgaaatcaaatttcacgagtttgtgctgttcattctcgaagaaaaaatgggtgcgacgcgtcgtacttttctgacagatttagcccgcaagaaagggttccgcgtcgagaatgaactgaccgacgaagttacccacatcgtggcagaaaatctgtcacgctctgaagtattggcttggctgaaagaacacaagatggagaagaccaagcaattcgaactgctggatattagctggcttatcgaaagcatgaaagttggtaaaccggtggacaccaaggggaaataccagttggcggaatcggttgaggtgagtgcgaacccagatccgacagaaggtcgtgtaaacgagctgcctcctactatgaaaaccgtttctccgtatgcgtgtcaacgccgcaccaccctgaacaaccgtaatcaacgttttacggactcgctggagattcttcgtgaaaattacgagctgaaaggcaacgacgatactgcgctggaatttcgtcgtgctatctccgtgctgaaaagccttccgtttgaggtacgtagcctgaaagacacggaaggattgccctggatcagtgatgaagtcaaagggattatggaagaaatcatcgaagtcggggagtcgcgtgaagtgcaggccgtgctcaatgatgagtggtatcaaagcttccacgcatttacgcgtgtctttggagtgggggtgaagacagcagacaagtggtaccgtatgggtctgcgcaccctcgaggatgttcgttccagcaagaccctgaagttgaccccgtggcagaaagtaggtctgctgtattatgaagatcttgctcgcggcgttacgcgtgccgaagctgacgcgatttggctgctggttcaggatgcagtcgcaactttcgacccggatgcgatcgtggagattgtcggtggacagcgtcgtgggaaacctcagggtcacgacgttgatctgcttatcagttctccgggagctgaaaaagagcaagaagaccaactcctgcagaaagtgatgaatctgtggaagaaacaagggttgttgctgtgtggtcgtctggaatggagtcagtgggaatgggggggttcgccttccggtaaggctgatgagggtgacgcggaggcgtcgtgctttctgatcctcaaactttatgatcatctggtgcgtaaaagtaaacgcaatatgccgactggttcgaacatgggcgagtccaaaccgtggaaagcaattaaagtagatctgctgcgttgcccccgcggcagttttgcgtttgcgatgttgcagtggaccggaagccgcatgttccgtcgtgatctgcgctggtacgccctggaagagaagaacatgatgctggacaatcatcagctgtatgacatgactcgtggtatccaactccctgctaaatcggaagaggaaattttcgaacatctggggcttgaatacctggaaccgttcgaacgtaacgca

SEQ ID NO: 4796 - protein, 528 aa, synthetic construct
  REGION 1..528: note = Variant of terminal deoxynucleotidyltransferase
MHHHHHGGSGSHGIRTIDSDFGKKQQKKGDNHDSSATYEIKFHEFVLFILEEKMGATRRTFLTDLARKKGFRVENELTDEVTHIVAENLSRSEVLAWLKEHKMEKTKQFELLDISWLIESMKVGKPVDTKGKYQLAESVEVSANPDPTEGRVNELPPTMKTVSPYACQRRTTLNNRNQRFTDSLEILRENYELKGNDDTALEFRRAISVLKSLPFEVRSLKDTEGLPWISDEVKGIMEEIIEVGESREVQAVLNDEWYQSFHAFTRVFGVGVKTADKWYRMGLRTLEDVRSSKTLKLTPWQKVGLLYYEDLARGVTRAEADAIWLLVQDAVATFDPDAIVEIVGGQRRGKPQGHDVDLLISSPGAEKEQEDQLLQKVMNLWKKQGLLLCGRLEWSQWEWGGSPSGKADEGDAEASCFLILKLYDHLVRKSKRNMPTGSNMGESKPWKAIKVDLLRCPRGSFAFAMLQWTGSRMFRRDLRWYALEEKNMMLDNHQLYDMTRGIQLPAKSEEEIFEHLGLEYLEPFERNA

SEQ ID NO: 4797 - DNA, 1584 bp, synthetic construct
  misc_feature 1..1584: note = Variant of terminal deoxynucleotidyltransferase
  source 1..1584: mol_type = other DNA
atgcaccatcatcatcatggcggtagcggcagccacggcattcgtaccatcgattcggacttcgggaagaaacagcagaaaaaaggcgataaccacgatagttccgccacttatgaaatcaaatttcacgagtttgtgctgttcattctcgaagaaaaaatgggtgcgacgcgtcgtacttttctgacagatttagcccgcaagaaagggttccgcgtcgagaatgaactgaccgacgaagttacccacatcgtggcagaaaatctgtcacgctctgaagtattggcttggctgaaagaacacaagatggagaagaccaagcaattcgaactgctggatattagctggcttatcgaaagcatgaaagttggtaaaccggtggacaccaaggggaaataccagttggcggaatcggttgaggtgagtgcgaacccagatccgacagaaggtcgtgtaaacgagctgcctcctactatgaaaaccgtttctccgtatgcgtgtcaacgccgcaccaccctgaacaaccgtaatcaacgttttacggactcgctggagattcttcgtgaaaattacgagctgaaaggcaacgacgatactgcgctggaatttcgtcgtgctatctccgtgctgaaaagccttccgtttgaggtacgtagcctgaaagacacggaaggattgccctggatcagtgatgaagtcaaagggattatggaagaaatcatcgaagtcggggagtcgcgtgaagtgcaggccgtgctcaatgatgagtggtatcaaagcttccacgcatttacgcgtgtctttggagtgggggtgaagacagcagacaagtggtaccgtatgggtctgcgcaccctcgaggatgttcgttccagcaagaccctgaagttgaccccgtggcagaaagtaggtctgctgtattatgaagatcttgctcgcggcgttacgcgtgccgaagctgacgcgatttggctgctggttcaggatgcagtcgcaactttcgacccggatgcgatcgtggagattgtcggtggacagcgtcgtgggaaacctcagggtcacgacgttgatctgcttatcagttctccgggagctgaaaaagagcaagaagaccaactcctgcagaaagtgatgaatctgtggaagaaacaagggttgttgctgtgtggtcgtctggaatggagtcagtgggaatgggggggttcgccttccggtaaggctgatgagggtgacgcggaggcgtcgtgctttctgatcctcaaactttatgatcatctggtgcgtaaaagtaaacgcaatatgccgactggttcgaacatgggcgagtccaaaccgtggaaagcaattaaagtagatctgctgcgttgcccccgcggcagttttgcgtttgcgatgttgcagtggaccggaagccgcatgttccgtcgtgatctgcgcatgtacgccctggaagagaagaacatgatgctggacaatcattcgctgtatgacatgactcgtggtatccaactccctgctaaatcggaagaggaaattttcgaacatctggggcttgaatacctggaaccgttcgaacgtaacgca

SEQ ID NO: 4798 - protein, 528 aa, synthetic construct
  REGION 1..528: note = Variant of terminal deoxynucleotidyltransferase
MHHHHHGGSGSHGIRTIDSDFGKKQQKKGDNHDSSATYEIKFHEFVLFILEEKMGATRRTFLTDLARKKGFRVENELTDEVTHIVAENLSRSEVLAWLKEHKMEKTKQFELLDISWLIESMKVGKPVDTKGKYQLAESVEVSANPDPTEGRVNELPPTMKTVSPYACQRRTTLNNRNQRFTDSLEILRENYELKGNDDTALEFRRAISVLKSLPFEVRSLKDTEGLPWISDEVKGIMEEIIEVGESREVQAVLNDEWYQSFHAFTRVFGVGVKTADKWYRMGLRTLEDVRSSKTLKLTPWQKVGLLYYEDLARGVTRAEADAIWLLVQDAVATFDPDAIVEIVGGQRRGKPQGHDVDLLISSPGAEKEQEDQLLQKVMNLWKKQGLLLCGRLEWSQWEWGGSPSGKADEGDAEASCFLILKLYDHLVRKSKRNMPTGSNMGESKPWKAIKVDLLRCPRGSFAFAMLQWTGSRMFRRDLRMYALEEKNMMLDNHSLYDMTRGIQLPAKSEEEIFEHLGLEYLEPFERNA

SEQ ID NO: 4799 - DNA, 1584 bp, synthetic construct
  misc_feature 1..1584: note = Variant of terminal deoxynucleotidyltransferase
  source 1..1584: mol_type = other DNA
atgcaccatcatcatcatggcggtagcggcagccacggcattcgtaccatcgattcggacttcgggaagaaacagcagaaaaaaggcgataaccacgatagttccgccacttatgaaatcaaatttcacgagtttgtgctgttcattctcgaagaaaaaatgggtgcgacgcgtcgtacttttctgacagatttagcccgcaagaaagggttccgcgtcgagaatgaactgaccgacgaagttacccacatcgtggcagaaaatctgtcacgctctgaagtattggcttggctgaaagaacacaagatggagaagaccaagcaattcgaactgctggatattagctggcttatcgaaagcatgaaagttggtaaaccggtggacaccaaggggaaataccagttggcggaatcggttgaggtgagtgcgaacccagatccgacagaaggtcgtgtaaacgagctgcctcctactatgaaaaccgtttctccgtatgcgtgtcaacgccgcaccaccctgaacaaccgtaatcaacgttttacggactcgctggagattcttcgtgaaaattacgagctgaaaggcaacgacgatactgcgctggaatttcgtcgtgctatctccgtgctgaaaagccttccgtttgaggtacgtagcctgaaagacacggaaggattgccctggatcagtgatgaagtcaaagggattatggaagaaatcatcgaagtcggggagtcgcgtgaagtgcaggccgtgctcaatgatgagtggtatcaaagcttccacgcatttacgcgtgtctttggagtgggggtgaagacagcagacaagtggtaccgtatgggtctgcgcaccctcgaggatgttcgttccagcaagaccctgaagttgaccccgtggcagaaagtaggtctgctgtattatgaagatcttgctcgcggcgttacgcgtgccgaagctgacgcgatttggctgctggttcaggatgcagtcgcaactttcgacccggatgcgatcgtggagattgtcggtggacagcgtcgtgggaaacctcagggtcacgacgttgatctgcttatcagttctccgggagctgaaaaagagcaagaagaccaactcctgcagaaagtgatgaatctgtggaagaaacaagggttgttgctgtgtggtcgtctggaatggagtcagtgggaatgggggggttcgccttccggtaaggctgatgagggtgacgcggaggcgtcgtgctttctgatcctcaaactttatgatcatctggtgcgtaaaagtaaacgcaatatgccgactggttcgaacatgggcgagtccaaaccgtggaaagcaattaaagtagatctgctgcgttgcccccgcggcagtatggcgtttgcgatgttgcagtggaccggaagccgcatgttccgtcgtgatctgcgctggtacgccctggaagagaagaacatgatgctggacaatcattcgctgtatgacatgactcgtggtatccaactccctgctaaatcggaagaggaaattttcgaacatctggggcttgaatacctggaaccgttcgaacgtaacgca

SEQ ID NO: 4800 - protein, 528 aa, synthetic construct
  REGION 1..528: note = Variant of terminal deoxynucleotidyltransferase
MHHHHHGGSGSHGIRTIDSDFGKKQQKKGDNHDSSATYEIKFHEFVLFILEEKMGATRRTFLTDLARKKGFRVENELTDEVTHIVAENLSRSEVLAWLKEHKMEKTKQFELLDISWLIESMKVGKPVDTKGKYQLAESVEVSANPDPTEGRVNELPPTMKTVSPYACQRRTTLNNRNQRFTDSLEILRENYELKGNDDTALEFRRAISVLKSLPFEVRSLKDTEGLPWISDEVKGIMEEIIEVGESREVQAVLNDEWYQSFHAFTRVFGVGVKTADKWYRMGLRTLEDVRSSKTLKLTPWQKVGLLYYEDLARGVTRAEADAIWLLVQDAVATFDPDAIVEIVGGQRRGKPQGHDVDLLISSPGAEKEQEDQLLQKVMNLWKKQGLLLCGRLEWSQWEWGGSPSGKADEGDAEASCFLILKLYDHLVRKSKRNMPTGSNMGESKPWKAIKVDLLRCPRGSMAFAMLQWTGSRMFRRDLRWYALEEKNMMLDNHSLYDMTRGIQLPAKSEEEIFEHLGLEYLEPFERNA

SEQ ID NO: 4801 - DNA, 1584 bp, synthetic construct
  misc_feature 1..1584: note = Variant of terminal deoxynucleotidyltransferase
  source 1..1584: mol_type = other DNA
atgcaccatcatcatcatggcggtagcggcagccacggcattcgtaccatcgattcggacttcgggaagaaacagcagaaaaaaggcgataaccacgatagttccgccacttatgaaatcaaatttcacgagtttgtgctgttcattctcgaagaaaaaatgggtgcgacgcgtcgtacttttctgacagatttagcccgcaagaaagggttccgcgtcgagaatgaactgaccgacgaagttacccacatcgtggcagaaaatctgtcacgctctgaagtattggcttggctgaaagaacacaagatggagaagaccaagcaattcgaactgctggatattagctggcttatcgaaagcatgaaagttggtaaaccggtggacaccaaggggaaataccagttggcggaatcggttgaggtgagtgcgaacccagatccgacagaaggtcgtgtaaacgagctgcctcctactatgaaaaccgtttctccgtatgcgtgtcaacgccgcaccaccctgaacaaccgtaatcaacgttttacggactcgctggagattcttcgtgaaaattacgagctgaaaggcaacgacgatactgcgctggaatttcgtcgtgctatctccgtgctgaaaagccttccgtttgaggtacgtagcctgaaagacacggaaggattgccctggatcagtgatgaagtcaaagggattatggaagaaatcatcgaagtcggggagtcgcgtgaagtgcaggccgtgctcaatgatgagtggtatcaaagcttccacgcatttacgcgtgtctttggagtgggggtgaagacagcagacaagtggtaccgtatgggtctgcgcaccctcgaggatgttcgttccagcaagaccctgaagttgaccccgtggcagaaagtaggtctgtgttattatgaagatcttgctcgcggcgttacgcgtgccgaagctgacgcgatttggctgctggttcaggatgcagtcgcaactttcgacccggatgcgatcgtggagattgtcggtggacagcgtcgtgggaaacctcagggtcacgacgttgatctgcttatcagttctccgggagctgaaaaagagcaagaagaccaactcctgcagaaagtgatgaatctgtggaagaaacaagggttgttgctgtgtggtcgtctggaatggagtcagtgggaatgggggggttcgccttccggtaaggctgatgagggtgacgcggaggcgtcgtgctttctgatcctcaaactttatgatcatctggtgcgtaaaagtaaacgcaatatgccgactggttcgaacatgggcgagtccaaaccgtggaaagcaattaaagtagatctgctgcgttgcccccgcggcagttttgcgtttgcgatgttgcagtggaccggaagccgcatgttccgtcgtgatctgcgctggtacgccctggaagagaagaacatgatgctggacaatcattcgctgtatgacatgactcgtggtatccaactccctgctaaatcggaagaggaaattttcgaacatctggggcttgaatacctggaaccgttcgaacgtaacgca

SEQ ID NO: 4802 - protein, 528 aa, synthetic construct
  REGION 1..528: note = Variant of terminal deoxynucleotidyltransferase
MHHHHHGGSGSHGIRTIDSDFGKKQQKKGDNHDSSATYEIKFHEFVLFILEEKMGATRRTFLTDLARKKGFRVENELTDEVTHIVAENLSRSEVLAWLKEHKMEKTKQFELLDISWLIESMKVGKPVDTKGKYQLAESVEVSANPDPTEGRVNELPPTMKTVSPYACQRRTTLNNRNQRFTDSLEILRENYELKGNDDTALEFRRAISVLKSLPFEVRSLKDTEGLPWISDEVKGIMEEIIEVGESREVQAVLNDEWYQSFHAFTRVFGVGVKTADKWYRMGLRTLEDVRSSKTLKLTPWQKVGLCYYEDLARGVTRAEADAIWLLVQDAVATFDPDAIVEIVGGQRRGKPQGHDVDLLISSPGAEKEQEDQLLQKVMNLWKKQGLLLCGRLEWSQWEWGGSPSGKADEGDAEASCFLILKLYDHLVRKSKRNMPTGSNMGESKPWKAIKVDLLRCPRGSFAFAMLQWTGSRMFRRDLRWYALEEKNMMLDNHSLYDMTRGIQLPAKSEEEIFEHLGLEYLEPFERNA

SEQ ID NO: 4803 - DNA, 1584 bp, synthetic construct
  misc_feature 1..1584: note = Variant of terminal deoxynucleotidyltransferase
  source 1..1584: mol_type = other DNA
atgcaccatcatcatcatggcggtagcggcagccacggcattcgtaccatcgattcggacttcgggaagaaacagcagaaaaaaggcgataaccacgatagttccgccacttatgaaatcaaatttcacgagtttgtgctgttcattctcgaagaaaaaatgggtgcgacgcgtcgtacttttctgacagatttagcccgcaagaaagggttccgcgtcgagaatgaactgaccgacgaagttacccacatcgtggcagaaaatctgtcacgctctgaagtattggcttggctgaaagaacacaagatggagaagaccaagcaattcgaactgctggatattagctggcttatcgaaagcatgaaagttggtaaaccggtggacaccaaggggaaataccagttggcggaatcggttgaggtgagtgcgaacccagatccgacagaaggtcgtgtaaacgagctgcctcctactatgaaaaccgtttctccgtatgcgtgtcaacgccgcaccaccctgaacaaccgtaatcaacgttttacggactcgctggagattcttcgtgaaaattacgagctgaaaggcaacgacgatactgcgctggaatttcgtcgtgctatctccgtgctgaaaagccttccgtttgaggtacgtagcctgaaagacacggaaggattgccctggatcagtgatgaagtcaaagggattatggaagaaatcatcgaagtcggggagtcgcgtgaagtgcaggccgtgctcaatgatgagtggtatcaaagcttccacgcatttacgcgtgtctttggagtgggggtgaagacagcagacaagtggtaccgtatgggtctgcgcaccctcgaggatgttcgttccagcaagaccctgaagttgaccccgtggcagaaagtaggtctgctgtattatgaagatcttgctcgcggcgttacgcgtgccgaagctgacgcgatttggctgctggttcaggatgcagtcgcaactttcgacccggatgcgatcgtggagattgtcggtggacagcgtcgtgggaaacctcagggtcacgacgttgatctgcttatcagttctccgggagctgaaaaagagcaagaagaccaactcctgcagaaagtgatgaatctgtggaagaaacaagggttgttgctgtgtggtcgtctggaatggagtcagtgggaatgggggggttcgccttccggtaaggctgatgagggtgacgcggaggcgtcgtgctttctgatcctcaaactttatgatcatctggtgcgtaaaagtaaacacaatatgccgactggttcgaacatgggcgagtccaaaccgtggaaagcaattaaagtagatctgctgcgttgcccccgcggcagttttgcgtttgcgatgttgcagtggaccggaagccgcatgttccgtcgtgatctgcgctggtacgccctggaagagaagaacatgatgctggacaatcattcgctgtatgacatgactcgtggtatccaactccctgctaaatcggaagaggaaattttcgaacatctggggcttgaatacctggaaccgttcgaacgtaacgca

SEQ ID NO: 4804 - protein, 528 aa, synthetic construct
  REGION 1..528: note = Variant of terminal deoxynucleotidyltransferase
MHHHHHGGSGSHGIRTIDSDFGKKQQKKGDNHDSSATYEIKFHEFVLFILEEKMGATRRTFLTDLARKKGFRVENELTDEVTHIVAENLSRSEVLAWLKEHKMEKTKQFELLDISWLIESMKVGKPVDTKGKYQLAESVEVSANPDPTEGRVNELPPTMKTVSPYACQRRTTLNNRNQRFTDSLEILRENYELKGNDDTALEFRRAISVLKSLPFEVRSLKDTEGLPWISDEVKGIMEEIIEVGESREVQAVLNDEWYQSFHAFTRVFGVGVKTADKWYRMGLRTLEDVRSSKTLKLTPWQKVGLLYYEDLARGVTRAEADAIWLLVQDAVATFDPDAIVEIVGGQRRGKPQGHDVDLLISSPGAEKEQEDQLLQKVMNLWKKQGLLLCGRLEWSQWEWGGSPSGKADEGDAEASCFLILKLYDHLVRKSKHNMPTGSNMGESKPWKAIKVDLLRCPRGSFAFAMLQWTGSRMFRRDLRWYALEEKNMMLDNHSLYDMTRGIQLPAKSEEEIFEHLGLEYLEPFERNA

SEQ ID NO: 4805 - DNA, 1584 bp, synthetic construct
  misc_feature 1..1584: note = Variant of terminal deoxynucleotidyltransferase
  source 1..1584: mol_type = other DNA
atgcaccatcatcatcatggcggtagcggcagccacggcattcgtaccatcgattcggacttcgggaagaaacagcagaaaaaaggcgataaccacgatagttccgccacttatgaaatcaaatttcacgagtttgtgctgttcattctcgaagaaaaaatgggtgcgacgcgtcgtacttttctgacagatttagcccgcaagaaagggttccgcgtcgagaatgaactgaccgacgaagttacccacatcgtggcagaaaatctgtcacgctctgaagtattggcttggctgaaagaacacaagatggagaagaccaagcaattcgaactgctggatattagctggcttatcgaaagcatgaaagttggtaaaccggtggacaccaaggggaaataccagttggcggaatcggttgaggtgagtgcgaacccagatccgacagaaggtcgtgtaaacgagctgcctcctactatgaaaaccgtttctccgtatgcgtgtcaacgccgcaccaccctgaacaaccgtaatcaacgttttacggactcgctggagattcttcgtgaaaattacgagctgaaaggcaacgacgatactgcgctggaatttcgtcgtgctatctccgtgctgaaaagccttccgtttgaggtacgtagcctgaaagacacggaaggattgccctggatcagtgatgaagtcaaagggattatggaagaaatcatcgaagtcggggagtcgcgtgaagtgcaggccgtgctcaatgatgagtggtatcaaagcttccacgcatttacgcgtgtctttggagtgggggtgaagacagcagacaagtggtaccgtatgggtctgcgcaccctcgaggatgttcgttccagcaagaccctgaagttgaccccgtggcagaaagtaggtctgctgtattatgaagatcttgctcgcggcgttacgcgtgccgaagctgacgcgatttggctgctggttcaggatgcagtcgcaactttcgacccggatgcgatcgtggagattgtcggtggacagcgtcgtgggaaacctcagggtcacgacgttgatctgcttatcagttctccgggagctgaaaaagagcaagaagaccaactcctgcagaaagtgatgaatctgatgaagaaacaagggttgttgctgtgtggtcgtctggaatggagtcagtgggaatgggggggttcgccttccggtaaggctgatgagggtgacgcggaggcgtcgtgctttctgatcctcaaactttatgatcatctggtgcgtaaaagtaaacgcaatatgccgactggttcgaacatgggcgagtccaaaccgtggaaagcaattaaagtagatctgctgcgttgcccccgcggcagttttgcgtttgcgatgttgcagtggaccggaagccgcatgttccgtcgtgatctgcgctggtacgccctggaagagaagaacatgatgctggacaatcattcgctgtatgacatgactcgtggtatccaactccctgctaaatcggaagaggaaattttcgaacatctggggcttgaatacctggaaccgttcgaacgtaacgca

SEQ ID NO: 4806 - protein, 528 aa, synthetic construct
  REGION 1..528: note = Variant of terminal deoxynucleotidyltransferase
MHHHHHGGSGSHGIRTIDSDFGKKQQKKGDNHDSSATYEIKFHEFVLFILEEKMGATRRTFLTDLARKKGFRVENELTDEVTHIVAENLSRSEVLAWLKEHKMEKTKQFELLDISWLIESMKVGKPVDTKGKYQLAESVEVSANPDPTEGRVNELPPTMKTVSPYACQRRTTLNNRNQRFTDSLEILRENYELKGNDDTALEFRRAISVLKSLPFEVRSLKDTEGLPWISDEVKGIMEEIIEVGESREVQAVLNDEWYQSFHAFTRVFGVGVKTADKWYRMGLRTLEDVRSSKTLKLTPWQKVGLLYYEDLARGVTRAEADAIWLLVQDAVATFDPDAIVEIVGGQRRGKPQGHDVDLLISSPGAEKEQEDQLLQKVMNLMKKQGLLLCGRLEWSQWEWGGSPSGKADEGDAEASCFLILKLYDHLVRKSKRNMPTGSNMGESKPWKAIKVDLLRCPRGSFAFAMLQWTGSRMFRRDLRWYALEEKNMMLDNHSLYDMTRGIQLPAKSEEEIFEHLGLEYLEPFERNA

SEQ ID NO: 4807 - DNA, 1584 bp, synthetic construct
  misc_feature 1..1584: note = Variant of terminal deoxynucleotidyltransferase
  source 1..1584: mol_type = other DNA
atgcaccatcatcatcatggcggtagcggcagccacggcattcgtaccatcgattcggacttcgggaagaaacagcagaaaaaaggcgataaccacgatagttccgccacttatgaaatcaaatttcacgagtttgtgctgttcattctcgaagaaaaaatgggtgcgacgcgtcgtacttttctgacagatttagcccgcaagaaagggttccgcgtcgagaatgaactgaccgacgaagttacccacatcgtggcagaaaatctgtcacgctctgaagtattggcttggctgaaagaacacaagatggagaagaccaagcaattcgaactgctggatattagctggcttatcgaaagcatgaaagttggtaaaccggtggacaccaaggggaaataccagttggcggaatcggttgaggtgagtgcgaacccagatccgacagaaggtcgtgtaaacgagctgcctcctactatgaaaaccgtttctccgtatgcgtgtcaacgccgcaccaccctgaacaaccgtaatcaacgttttacggactcgctggagattcttcgtgaaaattacgagctgaaaggcaacgacgatactgcgctggaatttcgtcgtgctatctccgtgctgaaaagccttccgtttgaggtacgtagcctgaaagacacggaaggattgccctggatcagtgatgaagtcaaagggattatggaagaaatcatcgaagtcggggagtcgcgtgaagtgcaggccgtgctcaatgatgagtggtatcaaagcttccacgcatttacgcgtgtctttggagtgggggtgaagacagcagacaagtggtaccgttgtggtctgcgcaccctcgaggatgttcgttccagcaagaccctgaagttgaccccgtggcagaaagtaggtctgctgtattatgaagatcttgctcgcggcgttacgcgtgccgaagctgacgcgatttggctgctggttcaggatgcagtcgcaactttcgacccggatgcgatcgtggagattgtcggtggacagcgtcgtgggaaacctcagggtcacgacgttgatctgcttatcagttctccgggagctgaaaaagagcaagaagaccaactcctgcagaaagtgatgaatctgtggaagaaacaagggttgttgctgtgtggtcgtctggaatggagtcagtgggaatgggggggttcgccttccggtaaggctgatgagggtgacgcggaggcgtcgtgctttctgatcctcaaactttatgatcatctggtgcgtaaaagtaaacgcaatatgccgactggttcgaacatgggcgagtccaaaccgtggaaagcaattaaagtagatctgctgcgttgcccccgcggcagttttgcgtttgcgatgttgcagtggaccggaagccgcatgttccgtcgtgatctgcgctggtacgccctggaagagaagaacatgatgctggacaatcattcgctgtatgacatgactcgtggtatccaactccctgctaaatcggaagaggaaattttcgaacatctggggcttgaatacctggaaccgttcgaacgtaacgca

SEQ ID NO: 4808 - protein, 528 aa, synthetic construct
  REGION 1..528: note = Variant of terminal deoxynucleotidyltransferase
MHHHHHGGSGSHGIRTIDSDFGKKQQKKGDNHDSSATYEIKFHEFVLFILEEKMGATRRTFLTDLARKKGFRVENELTDEVTHIVAENLSRSEVLAWLKEHKMEKTKQFELLDISWLIESMKVGKPVDTKGKYQLAESVEVSANPDPTEGRVNELPPTMKTVSPYACQRRTTLNNRNQRFTDSLEILRENYELKGNDDTALEFRRAISVLKSLPFEVRSLKDTEGLPWISDEVKGIMEEIIEVGESREVQAVLNDEWYQSFHAFTRVFGVGVKTADKWYRCGLRTLEDVRSSKTLKLTPWQKVGLLYYEDLARGVTRAEADAIWLLVQDAVATFDPDAIVEIVGGQRRGKPQGHDVDLLISSPGAEKEQEDQLLQKVMNLWKKQGLLLCGRLEWSQWEWGGSPSGKADEGDAEASCFLILKLYDHLVRKSKRNMPTGSNMGESKPWKAIKVDLLRCPRGSFAFAMLQWTGSRMFRRDLRWYALEEKNMMLDNHSLYDMTRGIQLPAKSEEEIFEHLGLEYLEPFERNA

SEQ ID NO: 4809 - DNA, 1584 bp, synthetic construct
  misc_feature 1..1584: note = Variant of terminal deoxynucleotidyltransferase
  source 1..1584: mol_type = other DNA
atgcaccatcatcatcatggcggtagcggcagccacggcattcgtaccatcgattcggacttcgggaagaaacagcagaaaaaaggcgataaccacgatagttccgccacttatgaaatcaaatttcacgagtttgtgctgttcattctcgaagaaaaaatgggtgcgacgcgtcgtacttttctgacagatttagcccgcaagaaagggttccgcgtcgagaatgaactgaccgacgaagttacccacatcgtggcagaaaatctgtcacgctctgaagtattggcttggctgaaagaacacaagatggagaagaccaagcaattcgaactgctggatattagctggcttatcgaaagcatgaaagttggtaaaccggtggacaccaaggggaaataccagttggcggaatcggttgaggtgagtgcgaacccagatccgacagaaggtcgtgtaaacgagctgcctcctactatgaaaaccgtttctccgtatgcgtgtcaacgccgcaccaccctgaacaaccgtaatcaacgttttacggactcgctggagattcttcgtgaaaattacgagctgaaaggcaacgacgatactgcgctggaatttcgtcgtgctatctccgtgctgaaaagccttccgtttgaggtacgtagcctgaaagacacggaaggattgccctggatcagtgatgaagtcaaagggattatggaagaaatcatcgaagtcggggagtcgcgtgaagtgcaggccgtgctcaatgatgagtggtatcaaagcttccacgcatttacgcgtgtctttggagtgggggtgaagacagcagacaagtggtaccgtatgggtctgcgcaccctcgaggatgttcgttccagcaagaccctgaagttgaccccgtggcagaaagtaggtctgctgtattatgaagatcttgctcgcggcgttacgcgtgccgaagctgacgcgatttggctgctggttcaggatgcagtcgcaactttcgacccggatgcgatcgtggagattgtcggtggacagcgtcgtgggaaacctcagggtcacgacgttgatctgcttatcagttctccgggagctgaaaaagagcaagaagaccaactcctgcagaaagtgatgaatctgtggaagaaacaagggttgttgctgtgtggtcgtctggaatggagtcagtgggaatgggggggttcgccttccggtaaggctgatgagggtgacgcggaggcgtcgtgctttctgatcctcaaactttatgatcatctggtgcgtaaaagtaaacgcaatatgccgactggttcgaacatgggcgagtccaaaccgtggaaagcaattaaagtagatctgctggcgtgcccccgcggcagttttgcgtttgcgatgttgcagtggaccggaagccgcatgttccgtcgtgatctgcgctggtacgccctggaagagaagaacatgatgctggacaatcattcgctgtatgacatgactcgtggtatccaactccctgctaaatcggaagaggaaattttcgaacatctggggcttgaatacctggaaccgttcgaacgtaacgca

SEQ ID NO: 4810 - protein, 528 aa, synthetic construct
  REGION 1..528: note = Variant of terminal deoxynucleotidyltransferase
MHHHHHGGSGSHGIRTIDSDFGKKQQKKGDNHDSSATYEIKFHEFVLFILEEKMGATRRTFLTDLARKKGFRVENELTDEVTHIVAENLSRSEVLAWLKEHKMEKTKQFELLDISWLIESMKVGKPVDTKGKYQLAESVEVSANPDPTEGRVNELPPTMKTVSPYACQRRTTLNNRNQRFTDSLEILRENYELKGNDDTALEFRRAISVLKSLPFEVRSLKDTEGLPWISDEVKGIMEEIIEVGESREVQAVLNDEWYQSFHAFTRVFGVGVKTADKWYRMGLRTLEDVRSSKTLKLTPWQKVGLLYYEDLARGVTRAEADAIWLLVQDAVATFDPDAIVEIVGGQRRGKPQGHDVDLLISSPGAEKEQEDQLLQKVMNLWKKQGLLLCGRLEWSQWEWGGSPSGKADEGDAEASCFLILKLYDHLVRKSKRNMPTGSNMGESKPWKAIKVDLLACPRGSFAFAMLQWTGSRMFRRDLRWYALEEKNMMLDNHSLYDMTRGIQLPAKSEEEIFEHLGLEYLEPFERNA

SEQ ID NO: 4811 - DNA, 1584 bp, synthetic construct
  misc_feature 1..1584: note = Variant of terminal deoxynucleotidyltransferase
  source 1..1584: mol_type = other DNA
atgcaccatcatcatcatggcggtagcggcagccacggcattcgtaccatcgattcggacttcgggaagaaacagcagaaaaaaggcgataaccacgatagttccgccacttatgaaatcaaatttcacgagtttgtgctgttcattctcgaagaaaaaatgggtgcgacgcgtcgtacttttctgacagatttagcccgcaagaaagggttccgcgtcgagaatgaactgaccgacgaagttacccacatcgtggcagaaaatctgtcacgctctgaagtattggcttggctgaaagaacacaagatggagaagaccaagcaattcgaactgctggatattagctggcttatcgaaagcatgaaagttggtaaaccggtggacaccaaggggaaataccagttggcggaatcggttgaggtgagtgcgaacccagatccgacagaaggtcgtgtaaacgagctgcctcctactatgaaaaccgtttctccgtatgcgtgtcaacgccgcaccaccctgaacaaccgtaatcaacgttttacggactcgctggagattcttcgtgaaaattacgagctgaaaggcaacgacgatactgcgctggaatttcgtcgtgctatctccgtgctgaaaagccttccgtttgaggtacgtagcctgaaagacacggaaggattgccctggatcagtgatgaagtcaaagggattatggaagaaatcatcgaagtcggggagtcgcgtgaagtgcaggccgtgctcaatgatgagtggtatcaaagcttccacgcatttacgcgtgtctttggagtgggggtgaagacagcagacaagtggtaccgcatgggtctgcgcaccctcgaggatgttcgttccagcaagaccctgaagttgaccccgtggcagaaagtaggtctgctgtattacgaagatcttgctcgcggcgttacgcgtgccgaagctgacgcgatttggctgctggttcaggatgcagtcgcaactttcgacccggatgcgatcgtggagattgtcggtggacagcgtcgtgggaaacctcagggtcacgacgttgatctgcttatcagttctccgggagctgaaaaagagcaagaagaccaactcctgggcaaagtgatgaatctgtggaagaaacaagggttgttgctgtgtggtcgtctggaatggagtcagtgggaatgggggggtctgccttccctgagcgctgatgagggtgacgcggaggcgtcgtgctttctgatcctcaaactttatgatcatctggtgcgtaaaagtaaacgcaatatgccgactggttcgaacatgggcgagtccaaaccgtggaaagcaattaaagtagatctgctgcgttgcccccgcggcagttttgcgtttgcgatgttgcagtggaccggaagccgcatgttccgtcgtgatctgcgctggtacgccctggaagagaagaacatgatgctggacaatcattcgctgtatgacatgactcgtggtatccaactccctgctaaatcggaagaggaaattttcgaacatctggggcttgaatacctggaaccgttcgaacgtaacgca

SEQ ID NO: 4812 - protein, 528 aa, synthetic construct
  REGION 1..528: note = Variant of terminal deoxynucleotidyltransferase
MHHHHHGGSGSHGIRTIDSDFGKKQQKKGDNHDSSATYEIKFHEFVLFILEEKMGATRRTFLTDLARKKGFRVENELTDEVTHIVAENLSRSEVLAWLKEHKMEKTKQFELLDISWLIESMKVGKPVDTKGKYQLAESVEVSANPDPTEGRVNELPPTMKTVSPYACQRRTTLNNRNQRFTDSLEILRENYELKGNDDTALEFRRAISVLKSLPFEVRSLKDTEGLPWISDEVKGIMEEIIEVGESREVQAVLNDEWYQSFHAFTRVFGVGVKTADKWYRMGLRTLEDVRSSKTLKLTPWQKVGLLYYEDLARGVTRAEADAIWLLVQDAVATFDPDAIVEIVGGQRRGKPQGHDVDLLISSPGAEKEQEDQLLGKVMNLWKKQGLLLCGRLEWSQWEWGGLPSLSADEGDAEASCFLILKLYDHLVRKSKRNMPTGSNMGESKPWKAIKVDLLRCPRGSFAFAMLQWTGSRMFRRDLRWYALEEKNMMLDNHSLYDMTRGIQLPAKSEEEIFEHLGLEYLEPFERNA

SEQ ID NO: 4813 - DNA, 1584 bp, synthetic construct
  misc_feature 1..1584: note = Variant of terminal deoxynucleotidyltransferase
  source 1..1584: mol_type = other DNA
atgcaccatcatcatcatggcggtagcggcagccacggcattcgtaccatcgattcggacttcgggaagaaacagcagaaaaaaggcgataaccacgatagttccgccacttatgaaatcaaatttcacgagtttgtgctgttcattctcgaagaaaaaatgggtgcgacgcgtcgtacttttctgacagatttagcccgcaagaaagggttccgcgtcgagaatgaactgaccgacgaagttacccacatcgtggcagaaaatctgtcacgctctgaagtattggcttggctgaaagaacacaagatggagaagaccaagcaattcgaactgctggatattagctggcttatcgaaagcatgaaagttggtaaaccggtggacaccaaggggaaataccagttggcggaatcggttgaggtgagtgcgaacccagatccgacagaaggtcgtgtaaacgagctgcctcctactatgaaaaccgtttctccgtatgcgtgtcaacgccgcaccaccctgaacaaccgtaatcaacgttttacggactcgctggagattcttcgtgaaaattacgagctgaaaggcaacgacgatactgcgctggaatttcgtcgtgctatctccgtgctgaaaagccttccgtttgaggtacgtagcctgaaagacacggaaggattgccctggatcagtgatgaagtcaaagggattatggaagaaatcatcgaagtcggggagtcgcgtgaagtgcaggccgtgctcaatgatgagtggtatcaaagcttccacgcatttacgcgtgtctttggagtgggggtgaagacagcagacaagtggtaccgcatgggtctgcgcaccctcgaggatgttcgttccagcaagaccctgaagttgaccccgtggcagaaagtaggtctgctgtattatgaagatcttgctcgcggcgttacgcgtgcggaagctgacgcgatttggctgctggttcaggatgcagtcgcaactttcgacccggatgcgatcgtggagattgtcggtggacagcgtcgtgggaaacctcagggtcacgacgttgatctgcttatcagttctccgggagctgaaaaagagcaagaagaccaactcctgcagaaagtgatgaatctgtggaagaaacaagggttgttgctgtgtggtcgtctggaatggagtcagtgggaatgggggggtctgccgtccggtaaggctgatgagggtgacgcggaggcgtcgtgctttctgatcctcaaactttatgatcatctggtgcgtaaaagtaaacgcaatatgccgactggttcgaacatgggcgagtccaaaccgtggaaagcaattaaagtagatctgctgcgttgcccccgcggcagttttgcgtttgcgatgttgcagtggaccggaagccgcatgttccgtcgtgatctgcgcgattacgcccgcgaagagaagaacatgatgctggacaatcattcgctgtatgacatgactcgtggtatccaactccctgctaaatcggaagaggaaattttcgaacatctggggcttgaatacctggaaccgttcgaacgtaacgca

SEQ ID NO: 4814 - protein, 528 aa, synthetic construct
  REGION 1..528: note = Variant of terminal deoxynucleotidyltransferase
MHHHHHGGSGSHGIRTIDSDFGKKQQKKGDNHDSSATYEIKFHEFVLFILEEKMGATRRTFLTDLARKKGFRVENELTDEVTHIVAENLSRSEVLAWLKEHKMEKTKQFELLDISWLIESMKVGKPVDTKGKYQLAESVEVSANPDPTEGRVNELPPTMKTVSPYACQRRTTLNNRNQRFTDSLEILRENYELKGNDDTALEFRRAISVLKSLPFEVRSLKDTEGLPWISDEVKGIMEEIIEVGESREVQAVLNDEWYQSFHAFTRVFGVGVKTADKWYRMGLRTLEDVRSSKTLKLTPWQKVGLLYYEDLARGVTRAEADAIWLLVQDAVATFDPDAIVEIVGGQRRGKPQGHDVDLLISSPGAEKEQEDQLLQKVMNLWKKQGLLLCGRLEWSQWEWGGLPSGKADEGDAEASCFLILKLYDHLVRKSKRNMPTGSNMGESKPWKAIKVDLLRCPRGSFAFAMLQWTGSRMFRRDLRDYAREEKNMMLDNHSLYDMTRGIQLPAKSEEEIFEHLGLEYLEPFERNA

SEQ ID NO: 4815 - DNA, 1584 bp, synthetic construct
  misc_feature 1..1584: note = Variant of terminal deoxynucleotidyltransferase
  source 1..1584: mol_type = other DNA
atgcaccatcatcatcatggcggtagcggcagccacggcattcgtaccatcgattcggacttcgggaagaaacagcagaaaaaaggcgataaccacgatagttccgccacttatgaaatcaaatttcacgagtttgtgctgttcattctcgaagaaaaaatgggtgcgacgcgtcgtacttttctgacagatttagcccgcaagaaagggttccgcgtcgagaatgaactgaccgacgaagttacccacatcgtggcagaaaatctgtcacgctctgaagtattggcttggctgaaagaacacaagatggagaagaccaagcaattcgaactgctggatattagctggcttatcgaaagcatgaaagttggtaaaccggtggacaccaaggggaaataccagttggcggaatcggttgaggtgagtgcgaacccagatccgacagaaggtcgtgtaaacgagctgcctcctactatgaaaaccgtttctccgtatgcgtgtcaacgccgcaccaccctgaacaaccgtaatcaacgttttacggactcgctggagattcttcgcgaaatgtacgagctgaaaggcaacgacgatactgcgctggaatttcgtcgtgctatctccgtgctgaaaagccttccgtttgaggtacgtagcctgaaagacacggaaggattgccctggatcagtgatgaagtcaaagggattatggaagaaatcatcgaagtcggggagtcgcgtgaagtgcaggccgtgctcaatgatgagtggtatcaaagcttccacgcatttacgcgtgtctttggagtgggggtgaagacagcagacaagtggtaccgcatgggtctgcgcaccctcgaggatgttcgttccagcaagaccctgaagttgaccccgtggcagaaagtaggtctgctgtattatgaagatcttgctcgcggcgttacgcgtgccgaagctgacgcgatttggctgctggttcaggatgcagtcgcaactttcgacccggatgcgatcgtggagattgtcggtggacagcgtcgtgggaaacctcagggtcacgacgttgatctgcttatcagttctccgggagctgaaaaagagcaagaagaccaactcctgcagaaagtgatgaatgtatggaagaaacaagggttgttgctgtgtggtcgtctggaatggagtcagtgggaatgggggggtctgccttccctgaaagctgatgagggtgacgcggaggcgtcgtgctttctgatcctcaaactttatgatcatctggtgcgtaaaagtaaacgcaatatgccgactggttcgaacatgggcgagtccaaaccgtggaaagcaattaaagtagatctgctgcgttgcccccgcggcagttttgcgtttgcgatgttgcagtggaccggaagccgcatgttccgtcgtgatctgcgctggtacgccctggaagagaagaacatgatgctggacaatcattcgctgtatgacatgactcgtggtatccaactccctgctaaatcggaagaggaaattttcgaacatctggggcttgaatacctggaaccgttcgaacgtaacgca

SEQ ID NO: 4816 - protein, 528 aa, synthetic construct
  REGION 1..528: note = Variant of terminal deoxynucleotidyltransferase
MHHHHHGGSGSHGIRTIDSDFGKKQQKKGDNHDSSATYEIKFHEFVLFILEEKMGATRRTFLTDLARKKGFRVENELTDEVTHIVAENLSRSEVLAWLKEHKMEKTKQFELLDISWLIESMKVGKPVDTKGKYQLAESVEVSANPDPTEGRVNELPPTMKTVSPYACQRRTTLNNRNQRFTDSLEILREMYELKGNDDTALEFRRAISVLKSLPFEVRSLKDTEGLPWISDEVKGIMEEIIEVGESREVQAVLNDEWYQSFHAFTRVFGVGVKTADKWYRMGLRTLEDVRSSKTLKLTPWQKVGLLYYEDLARGVTRAEADAIWLLVQDAVATFDPDAIVEIVGGQRRGKPQGHDVDLLISSPGAEKEQEDQLLQKVMNVWKKQGLLLCGRLEWSQWEWGGLPSLKADEGDAEASCFLILKLYDHLVRKSKRNMPTGSNMGESKPWKAIKVDLLRCPRGSFAFAMLQWTGSRMFRRDLRWYALEEKNMMLDNHSLYDMTRGIQLPAKSEEEIFEHLGLEYLEPFERNA

SEQ ID NO: 4817 - DNA, 1584 bp, synthetic construct
  misc_feature 1..1584: note = Variant of terminal deoxynucleotidyltransferase
  source 1..1584: mol_type = other DNA
atgcaccatcatcatcatggcggtagcggcagccacggcattcgtaccatcgattcggacttcgggaagaaacagcagaaaaaaggcgataaccacgatagttccgccacttatgaaatcaaatttcacgagtttgtgctgttcattctcgaagaaaaaatgggtgcgacgcgtcgtacttttctgacagatttagcccgcaagaaagggttccgcgtcgagaatgaactgaccgacgaagttacccacatcgtggcagaaaatctgtcacgctctgaagtattggcttggctgaaagaacacaagatggagaagaccaagcaattcgaactgctggatattagctggcttatcgaaagcatgaaagttggtaaaccggtggacaccaaggggaaataccagttggcggaatcggttgaggtgagtgcgaacccagatccgacagaaggtcgtgtaaacgagctgcctcctactatgaaaaccgtttctccgtatgcgtgtcaacgccgcaccaccctgaacaaccgtaatcaacgttttacggactcgctggagattcttcgtgaaaattacgagctgaaaggcaacgacgatactgcgctggaatttcgtcgtgctatctccgtgctgaaaagccttccgtttgaggtacgtagcctgaaagacacggaaggattgccctggatcagtgatgaagtcaaagggattatggaagaaatcatcgaagtcggggagtcgcgtgaagtgcaggccgtgctcaatgatgagtggtatcaaagcttccacgcatttacgcgtgtctttggagtgggggtgaagacagcagacaagtggtaccgcatgggtctgcgcaccctcgaggatgttcgttccagcaagaccctgaagttgaccccgtggcagaaagtaggtctgctgtattatgaagatcttgctcgcggcgttacgcgtgccgaagctgacgcgatttggctgctggttcaggatgcagtcgcaactttcgacccggatgcgatcgtggagattgtcggtggacagcgtcgtgggaaacctcagggtcacgacgttgatctgcttatcagttctccgggagctgaaaaagagcaagaagaccaactcctgcagaaagtgatgaatctgtggaagaaacaagggttgttgctgtgtggtcgtctggaaaccagtcagtgggaatgggggggtctgccgtccggtaaggctgatgagggtgacgcggaggcgtcgtgctttctgatcctcaaactttatgatcatctggtgcgtaaaagtaaacgcaatatgccgactggttcgaacatgggcgagtccaaaccgtggaaagcaattaaagtagatctgctgcgttgcccccgcggcagttttgcgtttgcgatgttgcagtggaccggaagccgcatgttccgtcgtgatctgcgcgattacgccctggaagagaagaacatgatgctggacaatcattcgctgtatgacatgactcgtggtatccaactccctgctaaatcggaagaggaaattttcgaacatctggggcttgaatacctggaaccgttcgaacgtaacgca

SEQ ID NO: 4818 - protein, 528 aa, synthetic construct
  REGION 1..528: note = Variant of terminal deoxynucleotidyltransferase
MHHHHHGGSGSHGIRTIDSDFGKKQQKKGDNHDSSATYEIKFHEFVLFILEEKMGATRRTFLTDLARKKGFRVENELTDEVTHIVAENLSRSEVLAWLKEHKMEKTKQFELLDISWLIESMKVGKPVDTKGKYQLAESVEVSANPDPTEGRVNELPPTMKTVSPYACQRRTTLNNRNQRFTDSLEILRENYELKGNDDTALEFRRAISVLKSLPFEVRSLKDTEGLPWISDEVKGIMEEIIEVGESREVQAVLNDEWYQSFHAFTRVFGVGVKTADKWYRMGLRTLEDVRSSKTLKLTPWQKVGLLYYEDLARGVTRAEADAIWLLVQDAVATFDPDAIVEIVGGQRRGKPQGHDVDLLISSPGAEKEQEDQLLQKVMNLWKKQGLLLCGRLETSQWEWGGLPSGKADEGDAEASCFLILKLYDHLVRKSKRNMPTGSNMGESKPWKAIKVDLLRCPRGSFAFAMLQWTGSRMFRRDLRDYALEEKNMMLDNHSLYDMTRGIQLPAKSEEEIFEHLGLEYLEPFERNA

SEQ ID NO: 4819 - DNA, 1584 bp, synthetic construct
  misc_feature 1..1584: note = Variant of terminal deoxynucleotidyltransferase
  source 1..1584: mol_type = other DNA
atgcaccatcatcatcatggcggtagcggcagccacggcattcgtaccatcgattcggacttcgggaagaaacagcagaaaaaaggcgataaccacgatagttccgccacttatgaaatcaaatttcacgagtttgtgctgttcattctcgaagaaaaaatgggtgcgacgcgtcgtacttttctgacagatttagcccgcaagaaagggttccgcgtcgagaatgaactgaccgacgaagttacccacatcgtggcagaaaatctgtcacgctctgaagtattggcttggctgaaagaacacaagatggagaagaccaagcaattcgaactgctggatattagctggcttatcgaaagcatgaaagttggtaaaccggtggacaccaaggggaaataccagttggcggaatcggttgaggtgagtgcgaacccagatccgacagaaggtcgtgtaaacgagctgcctcctactatgaaaaccgtttctccgtatgcgtgtcaacgccgcaccaccctgaacaaccgtaatcaacgttttacggactcgctggagattcttcgtgaaaattacgagctgaaaggcaacgacgatactgcgctggaatttcgtcgtgctatctccgtgctgaaaagccttccgtttgaggtacgtagcctgaaagacacggaaggattgccctggatcagtgatgaagtcaaagggattatggaagaaatcatcgaagtcggggagtcgcgtgaagtgcaggccgtgctcaatgatgagtggtatcaaagcttccacgcatttacgcgtgtctttggagtgggggtgaagacagcagacaagtggtaccgcatgggtctgcgcaccctcgaggatgttcgttccagcaagaccctgaaattgaccccgtggagcaaagtaggtctgctgtattatgaagatcttgctcgcggcgttacgcgtgcggaagctgacgcgatttggctgctggttcaggatgcagtcgcaactttcgacccggatgcgatcgtggagattgtcggtggacagcgtcgtgggaaacctcagggtcacgacgttgatctgcttatcagttctccgggagctgaaaaagagcaagaagaccaactcctgcagaaagtgatgaatctgtggaagaaacaagggttgttgctgtgtggtcgtctggaaaccagtcagtgggaatgggggggtctgccgtccggtaaggctgatgagggtgacgcggaggcgtcgtgctttctgatcctcaaactttatgatcatctggtgcgtaaaagtaaacgcaatatgccgactggttcgaacatgggcgagtccaaaccgtggaaagcaattaaagtagatctgctgcgttgcccccgcggcagttttgcgtttgcgatgttgcagtggaccggaagccgcatgttccgtcgtgatctgcgcgattacgccctggaagagaagaacatgatgctggacaatcattcgctgtatgacatgactcgtggtatccaactccctgctaaatcggaagaggaaattttcgaacatctggggcttgaatacctggaaccgttcgaacgtaacgca

SEQ ID NO: 4820 - protein, 528 aa, synthetic construct
  REGION 1..528: note = Variant of terminal deoxynucleotidyltransferase
MHHHHHGGSGSHGIRTIDSDFGKKQQKKGDNHDSSATYEIKFHEFVLFILEEKMGATRRTFLTDLARKKGFRVENELTDEVTHIVAENLSRSEVLAWLKEHKMEKTKQFELLDISWLIESMKVGKPVDTKGKYQLAESVEVSANPDPTEGRVNELPPTMKTVSPYACQRRTTLNNRNQRFTDSLEILRENYELKGNDDTALEFRRAISVLKSLPFEVRSLKDTEGLPWISDEVKGIMEEIIEVGESREVQAVLNDEWYQSFHAFTRVFGVGVKTADKWYRMGLRTLEDVRSSKTLKLTPWSKVGLLYYEDLARGVTRAEADAIWLLVQDAVATFDPDAIVEIVGGQRRGKPQGHDVDLLISSPGAEKEQEDQLLQKVMNLWKKQGLLLCGRLETSQWEWGGLPSGKADEGDAEASCFLILKLYDHLVRKSKRNMPTGSNMGESKPWKAIKVDLLRCPRGSFAFAMLQWTGSRMFRRDLRDYALEEKNMMLDNHSLYDMTRGIQLPAKSEEEIFEHLGLEYLEPFERNA

SEQ ID NO: 4821 - DNA, 1584 bp, synthetic construct
  misc_feature 1..1584: note = Variant of terminal deoxynucleotidyltransferase
  source 1..1584: mol_type = other DNA
atgcaccatcatcatcatggcggtagcggcagccacggcattcgtaccatcgattcggacttcgggaagaaacagcagaaaaaaggcgataaccacgatagttccgccacttatgaaatcaaatttcacgagtttgtgctgttcattctcgaagaaaaaatgggtgcgacgcgtcgtacttttctgacagatttagcccgcaagaaagggttccgcgtcgagaatgaactgaccgacgaagttacccacatcgtggcagaaaatctgtcacgctctgaagtattggcttggctgaaagaacacaagatggagaagaccaagcaattcgaactgctggatattagctggcttatcgaaagcatgaaagttggtaaaccggtggacaccaaggggaaataccagttggcggaatcggttgaggtgagtgcgaacccagatccgacagaaggtcgtgtaaacgagctgcctcctactatgaaaaccgtttctccgtatgcgtgtcaacgccgcaccaccctgaacaaccgtaatcaacgttttacggactcgctggagattcttcgcgaaatgtacgagctgaaaggcaacgacgatactgcgctggaatttcgtcgtgctatctccgtgctgaaaagccttccgtttgaggtacgtagcctgaaagacacggaaggattgccctggatcagtgatgaagtcaaagggattatggaagaaatcatcgaagtcggggagtcgcgtgaagtgcaggccgtgctcaatgatgagtggtatcaaagcttccacgcatttacgcgtgtctttggagtgggggtgaagacagcagacaagtggtaccgcatgggtctgcgcaccctcgaggatgttcgttccagcaagaccctgaagttgaccccgtggcagaaagtaggtctgctgtattatgaagatcttgctcgcggcgttacgcgtgccgaagctgacgcgatttggctgctggttcaggatgcagtcgcaactttcgacccggatgcgatcgtggagattgtcggtggacagcgtcgtgggaaacctcagggtcacgacgttgatctgcttatcagttctccgggagctgaaaaagagcaagaagaccaactcctgcagaaagtgatgaatctgtggaagaaacaagggttgttgctgtgtggtcgtctggaatggagtcagtgggaatgggggggtctgccttccctgagcgctgatgagggtgacgcggaggcgtcgtgctttctgatcctcaaactttatgatcatctggtgcgtaaaagtaaacgcaatatgccgactggttcgaacatgggcgagtccaaaccgtggaaagcaattaaagtagatctgctgcgttgcccccgcggcagttttgcgtttgcgatgttgcagtggaccggaagccgcatgttccgtcgtgatctgcgctggtacgccctggaagagaagaacatgatgctggacaatcattcgctgtatgacatgactcgtggtatccaactccctgctaaatcggaagaggaaattttcgaacatctggggcttgaatacctggaaccgttcgaacgtaacgca

SEQ ID NO: 4822 - protein, 528 aa, synthetic construct
  REGION 1..528: note = Variant of terminal deoxynucleotidyltransferase
MHHHHHGGSGSHGIRTIDSDFGKKQQKKGDNHDSSATYEIKFHEFVLFILEEKMGATRRTFLTDLARKKGFRVENELTDEVTHIVAENLSRSEVLAWLKEHKMEKTKQFELLDISWLIESMKVGKPVDTKGKYQLAESVEVSANPDPTEGRVNELPPTMKTVSPYACQRRTTLNNRNQRFTDSLEILREMYELKGNDDTALEFRRAISVLKSLPFEVRSLKDTEGLPWISDEVKGIMEEIIEVGESREVQAVLNDEWYQSFHAFTRVFGVGVKTADKWYRMGLRTLEDVRSSKTLKLTPWQKVGLLYYEDLARGVTRAEADAIWLLVQDAVATFDPDAIVEIVGGQRRGKPQGHDVDLLISSPGAEKEQEDQLLQKVMNLWKKQGLLLCGRLEWSQWEWGGLPSLSADEGDAEASCFLILKLYDHLVRKSKRNMPTGSNMGESKPWKAIKVDLLRCPRGSFAFAMLQWTGSRMFRRDLRWYALEEKNMMLDNHSLYDMTRGIQLPAKSEEEIFEHLGLEYLEPFERNA

SEQ ID NO: 4823 - DNA, 1584 bp, synthetic construct
  misc_feature 1..1584: note = Variant of terminal deoxynucleotidyltransferase
  source 1..1584: mol_type = other DNA
atgcaccatcatcatcatggcggtagcggcagccacggcattcgtaccatcgattcggacttcgggaagaaacagcagaaaaaaggcgataaccacgatagttccgccacttatgaaatcaaatttcacgagtttgtgctgttcattctcgaagaaaaaatgggtgcgacgcgtcgtacttttctgacagatttagcccgcaagaaagggttccgcgtcgagaatgaactgaccgacgaagttacccacatcgtggcagaaaatctgtcacgctctgaagtattggcttggctgaaagaacacaagatggagaagaccaagcaattcgaactgctggatattagctggcttatcgaaagcatgaaagttggtaaaccggtggacaccaaggggaaataccagttggcggaatcggttgaggtgagtgcgaacccagatccgacagaaggtcgtgtaaacgagctgcctcctactatgaaaaccgtttctccgtatgcgtgtcaacgccgcaccaccctgaacaaccgtaatcaacgttttacggactcgctggagattcttcgtgaaaattacgagctgaaaggcaacgacgatactgcgctggaatttcgtcgtgctatctccgtgctgaaaagccttccgtttgaggtacgtagcctgaaagacacggaaggattgccctggatcagtgatgaagtcaaagggattatggaagaaatcatcgaagtcggggagtcgcgtgaagtgcaggccgtgctcaatgatgagtggtatcaaagcttccacgcatttacgcgtgtctttggagtgggggtgaagacagcagacaagtggtaccgcatgggtctgcgcaccctcgaggatgttcgttccagcaagaccctgaagttgaccccgtggcagaaagtaggtctgctgtattacgaagatcttgctcgcggcgttacgcgtgccgaagctgacgcgatttggctgctggttcaggatgcagtcgcaactttcgacccggatgcgatcgtggagattgtcggtggacagcgtcgtgggaaacctcagggtcacgacgttgatctgcttatcagttctccgggagctgaaaaagagcaagaagaccaactcctgggcaaagtgatgaatctgtggaagaaacaagggttgttgctgtgtggtcgtctggaatggagtcagtgggaatgggggggtctgccgtccggtaaggctgatgagggtgacgcggaggcgtcgtgctttctgatcctcaaactttatgatcatctggtgcgtaaaagtaaacgcaatatgccgactggttcgaacatgggcgagtccaaaccgtggaaagcaattaaagtagatctgctgcgttgcccccgcggcagttttgcgtttgcgatgttgcagtggaccggaagccgcatgttccgtcgtgatctgcgctggtacgccctggaagagaagaacatgatgctggacaatcattcgctgtatgacatgactcgtggtatccaactccctgctaaatcggaagaggaaattttcgaacatctggggcttgaatacctggaaccgttcgaacgtaacgca

SEQ ID NO: 4824 - protein, 528 aa, synthetic construct
  REGION 1..528: note = Variant of terminal deoxynucleotidyltransferase
MHHHHHGGSGSHGIRTIDSDFGKKQQKKGDNHDSSATYEIKFHEFVLFILEEKMGATRRTFLTDLARKKGFRVENELTDEVTHIVAENLSRSEVLAWLKEHKMEKTKQFELLDISWLIESMKVGKPVDTKGKYQLAESVEVSANPDPTEGRVNELPPTMKTVSPYACQRRTTLNNRNQRFTDSLEILRENYELKGNDDTALEFRRAISVLKSLPFEVRSLKDTEGLPWISDEVKGIMEEIIEVGESREVQAVLNDEWYQSFHAFTRVFGVGVKTADKWYRMGLRTLEDVRSSKTLKLTPWQKVGLLYYEDLARGVTRAEADAIWLLVQDAVATFDPDAIVEIVGGQRRGKPQGHDVDLLISSPGAEKEQEDQLLGKVMNLWKKQGLLLCGRLEWSQWEWGGLPSGKADEGDAEASCFLILKLYDHLVRKSKRNMPTGSNMGESKPWKAIKVDLLRCPRGSFAFAMLQWTGSRMFRRDLRWYALEEKNMMLDNHSLYDMTRGIQLPAKSEEEIFEHLGLEYLEPFERNA

SEQ ID NO: 4825 - DNA, 1584 bp, synthetic construct
  misc_feature 1..1584: note = Variant of terminal deoxynucleotidyltransferase
  source 1..1584: mol_type = other DNA
atgcaccatcatcatcatggcggtagcggcagccacggcattcgtaccatcgattcggacttcgggaagaaacagcagaaaaaaggcgataaccacgatagttccgccacttatgaaatcaaatttcacgagtttgtgctgttcattctcgaagaaaaaatgggtgcgacgcgtcgtacttttctgacagatttagcccgcaagaaagggttccgcgtcgagaatgaactgaccgacgaagttacccacatcgtggcagaaaatctgtcacgctctgaagtattggcttggctgaaagaacacaagatggagaagaccaagcaattcgaactgctggatattagctggcttatcgaaagcatgaaagttggtaaaccggtggacaccaaggggaaataccagttggcggaatcggttgaggtgagtgcgaacccagatccgacagaaggtcgtgtaaacgagctgcctcctactatgaaaaccgtttctccgtatgcgtgtcaacgccgcaccaccctgaacaaccgtaatcaacgttttacggactcgctggagattcttcgtgaaaattacgagctgaaaggcaacgacgatactgcgctggaatttcgtcgtgctatctccgtgctgaaaagccttccgtttgaggtacgtagcctgaaagacacggaaggattgccctggatcagtgatgaagtcaaagggattatggaagaaatcatcgaagtcggggagtcgcgtgaagtgcaggccgtgctcaatgatgagtggtatcaaagcttccacgcatttacgcgtgtctttggagtgggggcgaagacagcagacaagtggtaccgcatgggtctgcgcaccctcgaggatgttcgttccagcaagaccctgaagttgaccccgtggcagaaagtaggtctgctgtattatgaagatcttgctcgcggcgttacgcgtgaagaagctgacgcgatttggctgctggttcaggatgcagtcgcaactttcgacccggatgcgatcgtggagattgtcggtggacagcgtcgtgggaaacctcagggtcacgacgttgatctgcttatcagttctccgggagctgaaaaagagcaagaagaccaactcctgcagaaagtgatgaatctgtggaagaaacaagggttgttgctgtgtggtcgtctggaatggagtcagtgggaatgggggggtctgccgtccggtaaggctgatgagggtgacgcggaggcgtcgtgctttctgatcctcaaactttatgatcatctggtgcgtaaaagtaaacgcaatatgccgactggttcgaacatgggcgagtccaaaccgtggaaagcaattaaagtagatctgctgcgttgcccccgcggcagttttgcgtttgcgatgttgcagtggaccggaagccgcatgttccgtcgtgatctgcgcgattacgcccgcgaagagaagaacatgatgctggacaatcattcgctgtatgacatgactcgtggtatccaactccctgctaaatcggaagaggaaattttcgaacatctggggcttgaatacctggaaccgttcgaacgtaacgca

SEQ ID NO: 4826 - protein, 528 aa, synthetic construct
  REGION 1..528: note = Variant of terminal deoxynucleotidyltransferase
MHHHHHGGSGSHGIRTIDSDFGKKQQKKGDNHDSSATYEIKFHEFVLFILEEKMGATRRTFLTDLARKKGFRVENELTDEVTHIVAENLSRSEVLAWLKEHKMEKTKQFELLDISWLIESMKVGKPVDTKGKYQLAESVEVSANPDPTEGRVNELPPTMKTVSPYACQRRTTLNNRNQRFTDSLEILRENYELKGNDDTALEFRRAISVLKSLPFEVRSLKDTEGLPWISDEVKGIMEEIIEVGESREVQAVLNDEWYQSFHAFTRVFGVGAKTADKWYRMGLRTLEDVRSSKTLKLTPWQKVGLLYYEDLARGVTREEADAIWLLVQDAVATFDPDAIVEIVGGQRRGKPQGHDVDLLISSPGAEKEQEDQLLQKVMNLWKKQGLLLCGRLEWSQWEWGGLPSGKADEGDAEASCFLILKLYDHLVRKSKRNMPTGSNMGESKPWKAIKVDLLRCPRGSFAFAMLQWTGSRMFRRDLRDYAREEKNMMLDNHSLYDMTRGIQLPAKSEEEIFEHLGLEYLEPFERNA

SEQ ID NO: 4827 - DNA, 1584 bp, synthetic construct
  misc_feature 1..1584: note = Variant of terminal deoxynucleotidyltransferase
  source 1..1584: mol_type = other DNA
atgcaccatcatcatcatggcggtagcggcagccacggcattcgtaccatcgattcggacttcgggaagaaacagcagaaaaaaggcgataaccacgatagttccgccacttatgaaatcaaatttcacgagtttgtgctgttcattctcgaagaaaaaatgggtgcgacgcgtcgtacttttctgacagatttagcccgcaagaaagggttccgcgtcgagaatgaactgaccgacgaagttacccacatcgtggcagaaaatctgtcacgctctgaagtattggcttggctgaaagaacacaagatggagaagaccaagcaattcgaactgctggatattagctggcttatcgaaagcatgaaagttggtaaaccggtggacaccaaggggaaataccagttggcggaatcggttgaggtgagtgcgaacccagatccgacagaaggtcgtgtaaacgagctgcctcctactatgaaaaccgtttctccgtatgcgtgtcaacgccgcaccaccctgaacaaccgtaatcaacgttttacggactcgctggagattcttcgcgaaatgtacgagctgaaaggcaacgacgatactgcgctggaatttcgtcgtgctatctccgtgctgaaaagccttccgtttgaggtacgtagcctgaaagacacggaaggattgccctggatcagtgatgaagtcaaagggattatggaagaaatcatcgaagtcggggagtcgcgtgaagtgcaggccgtgctcaatgatgagtggtatcaaagcttccacgcatttacgcgtgtctttggagtgggggtgaagacagcagacaagtggtaccgcatgggtctgcgcaccctcgaggatgttcgttccagcaagaccctgaagttgaccccgtggcagaaagtaggtctgctgtattatgaagatcttgctcgcggcgttacgcgtgccgaagctgacgcgatttggctgctggttcaggatgcagtcgcaactttcgacccggatgcgatcgtggagattgtcggtggacagcgtcgtgggaaacctcagggtcacgacgttgatctgcttatcagttctccgggagctgaaaaagagcaagaagaccaactcctgcagaaagtgatgaatctgtggaagaaacaagggttgttgctgtgtggtcgtctggaatggagtcagtgggaatgggggggtctgccgtccggtaaggctgatgagggtgacgcggaggcgtcgtgctttctgatcctcaaactttatgatcatctggtgcgtaaaagtaaacgcaatatgccgactggttcgaacatgggcgagtccaaaccgtggaaagcaattaaagtagatctgctgcgttgcccccgcggcagttttgcgtttgcgatgttgcagtggaccggaagccgcatgttccgtcgtgatctgcgctggtacgccctggaagagaagaacatgatgctggacaatcattcgctgtatgacatgactcgtggtatccaactccctgctaaatcggaagaggaaattttcgaacatctggggcttgaatacctggaaccgttcgaacgtaacgca

SEQ ID NO: 4828 - protein, 528 aa, synthetic construct
  REGION 1..528: note = Variant of terminal deoxynucleotidyltransferase
MHHHHHGGSGSHGIRTIDSDFGKKQQKKGDNHDSSATYEIKFHEFVLFILEEKMGATRRTFLTDLARKKGFRVENELTDEVTHIVAENLSRSEVLAWLKEHKMEKTKQFELLDISWLIESMKVGKPVDTKGKYQLAESVEVSANPDPTEGRVNELPPTMKTVSPYACQRRTTLNNRNQRFTDSLEILREMYELKGNDDTALEFRRAISVLKSLPFEVRSLKDTEGLPWISDEVKGIMEEIIEVGESREVQAVLNDEWYQSFHAFTRVFGVGVKTADKWYRMGLRTLEDVRSSKTLKLTPWQKVGLLYYEDLARGVTRAEADAIWLLVQDAVATFDPDAIVEIVGGQRRGKPQGHDVDLLISSPGAEKEQEDQLLQKVMNLWKKQGLLLCGRLEWSQWEWGGLPSGKADEGDAEASCFLILKLYDHLVRKSKRNMPTGSNMGESKPWKAIKVDLLRCPRGSFAFAMLQWTGSRMFRRDLRWYALEEKNMMLDNHSLYDMTRGIQLPAKSEEEIFEHLGLEYLEPFERNA

SEQ ID NO: 4829 - DNA, 1584 bp, synthetic construct
  misc_feature 1..1584: note = Variant of terminal deoxynucleotidyltransferase
  source 1..1584: mol_type = other DNA
atgcaccatcatcatcatggcggtagcggcagccacggcattcgtaccatcgattcggacttcgggaagaaacagcagaaaaaaggcgataaccacgatagttccgccacttatgaaatcaaatttcacgagtttgtgctgttcattctcgaagaaaaaatgggtgcgacgcgtcgtacttttctgacagatttagcccgcaagaaagggttccgcgtcgagaatgaactgaccgacgaagttacccacatcgtggcagaaaatctgtcacgctctgaagtattggcttggctgaaagaacacaagatggagaagaccaagcaattcgaactgctggatattagctggcttatcgaaagcatgaaagttggtaaaccggtggacaccaaggggaaataccagttggcggaatcggttgaggtgagtgcgaacccagatccgacagaaggtcgtgtaaacgagctgcctcctactatgaaaaccgtttctccgtatgcgtgtcaacgccgcaccaccctgaacaaccgtaatcaacgttttacggactcgctggagattcttcgtgaaaattacgagctgaaaggcaacgacgatactgcgctggaatttcgtcgtgctatctccgtgctgaaaagccttccgtttgaggtacgtagcctgaaagacacggaaggattgccctggatcagtgatgaagtcaaagggattatggaagaaatcatcgaagtcggggagtcgcgtgaagtgcaggccgtgctcaatgatgagtggtatcaaagcttccacgcatttacgcgtgtctttggagtgggggcgaagacagcagacaagtggtaccgcatgggtctgcgcaccctcgaggatgttcgttccagcaagaccctgaaattgaccccgtggagcaaagtaggtctgctgtattatgaagatcttgctcgcggcgttacgcgtgccgaagctgacgcgatttggctgctggttcaggatgcagtcgcaactttcgacccggatgcgatcgtggagattgtcggtggacagcgtcgtgggaaacctcagggtcacgacgttgatctgcttatcagttctccgggagctgaaaaagagcaagaagaccaactcctgcagaaagtgatgaatctgtggaagaaacaagggttgttgctgtgtggtcgtctgaaaaccagtcagtgggaatgggggggtctgccgtccggtaaggctgatgagggtgacgcggaggcgtcgtgctttctgatcctcaaactttatgatcatctggtgcgtaaaagtaaacgcaatatgccgactggttcgaacatgggcgagtccaaaccgtggaaagcaattaaagtagatctgctgcgttgcccccgcggcagttttgcgtttgcgatgttgcagtggaccggaagccgcatgttccgtcgtgatctgcgcgattacgccctggaagagaagaacatgatgctggacaatcattcgctgtatgacatgactcgtggtatccaactccctgctaaatcggaagaggaaattttcgaacatctggggcttgaatacctggaaccgttcgaacgtaacgca

SEQ ID NO: 4830 - protein, 528 aa, synthetic construct
  REGION 1..528: note = Variant of terminal deoxynucleotidyltransferase
MHHHHHGGSGSHGIRTIDSDFGKKQQKKGDNHDSSATYEIKFHEFVLFILEEKMGATRRTFLTDLARKKGFRVENELTDEVTHIVAENLSRSEVLAWLKEHKMEKTKQFELLDISWLIESMKVGKPVDTKGKYQLAESVEVSANPDPTEGRVNELPPTMKTVSPYACQRRTTLNNRNQRFTDSLEILRENYELKGNDDTALEFRRAISVLKSLPFEVRSLKDTEGLPWISDEVKGIMEEIIEVGESREVQAVLNDEWYQSFHAFTRVFGVGAKTADKWYRMGLRTLEDVRSSKTLKLTPWSKVGLLYYEDLARGVTRAEADAIWLLVQDAVATFDPDAIVEIVGGQRRGKPQGHDVDLLISSPGAEKEQEDQLLQKVMNLWKKQGLLLCGRLKTSQWEWGGLPSGKADEGDAEASCFLILKLYDHLVRKSKRNMPTGSNMGESKPWKAIKVDLLRCPRGSFAFAMLQWTGSRMFRRDLRDYALEEKNMMLDNHSLYDMTRGIQLPAKSEEEIFEHLGLEYLEPFERNA

SEQ ID NO: 4831 - DNA, 1584 bp, synthetic construct
  misc_feature 1..1584: note = Variant of terminal deoxynucleotidyltransferase
  source 1..1584: mol_type = other DNA
atgcaccatcatcatcatggcggtagcggcagccacggcattcgtaccatcgattcggacttcgggaagaaacagcagaaaaaaggcgataaccacgatagttccgccacttatgaaatcaaatttcacgagtttgtgctgttcattctcgaagaaaaaatgggtgcgacgcgtcgtacttttctgacagatttagcccgcaagaaagggttccgcgtcgagaatgaactgaccgacgaagttacccacatcgtggcagaaaatctgtcacgctctgaagtattggcttggctgaaagaacacaagatggagaagaccaagcaattcgaactgctggatattagctggcttatcgaaagcatgaaagttggtaaaccggtggacaccaaggggaaataccagttggcggaatcggttgaggtgagtgcgaacccagatccgacagaaggtcgtgtaaacgagctgcctcctactatgaaaaccgtttctccgtatgcgtgtcaacgccgcaccaccctgaacaaccgtaatcaacgttttacggactcgctggagattcttcgtgaaaattacgagctgaaaggcaacgacgatactgcgctggaatttcgtcgtgctatctccgtgctgaaaagccttccgtttgaggtacgtagcctgaaagacacggaaggattgccctggatcagtgatgaagtcaaagggattatggaagaaatcatcgaagtcggggagtcgcgtgaagtgcaggccgtgctcaatgatgagtggtatcaaagcttccacgcatttacgcgtgtctttggagtgggggtgaagacagcagacaagtggtaccgcatgggtctgcgcaccctcgaggatgttcgttccagcaagaccctgaagttgaccccgtggcagaaagtaggtctgctgtattacgaagatcttgctcgcggcgttacgcgtgccgaagctgacgcgatttggctgctggttcaggatgcagtcgcaactttcgacccggatgcgatcgtggagattgtcggtggacagcgtcgtgggaaacctcagggtcacgacgttgatctgcttatcagttctccgggagctgaaaaagagcaagaagaccaactcctgggcaaagtgatgaatctgtggaagaaacaagggttgttgctgtgtggtcgtctggaatggagtcagtgggaatgggggggtctgccttccctgaaagctgatgagggtgacgcggaggcgtcgtgctttctgatcctcaaactttatgatcatctggtgcgtaaaagtaaacgcaatatgccgactggttcgaacatgggcgagtccaaaccgtggaaagcaattaaagtagatctgctgcgttgcccccgcggcagttttgcgtttgcgatgttgcagtggaccggaagccgcatgttccgtcgtgatctgcgctggtacgccctggaagagaagaacatgatgctggacaatcattcgctgtatgacatgactcgtggtatccaactccctgctaaatcggaagaggaaattttcgaacatctggggcttgaatacctggaaccgttcgaacgtaacgca

SEQ ID NO: 4832 - protein, 528 aa, synthetic construct
  REGION 1..528: note = Variant of terminal deoxynucleotidyltransferase
MHHHHHGGSGSHGIRTIDSDFGKKQQKKGDNHDSSATYEIKFHEFVLFILEEKMGATRRTFLTDLARKKGFRVENELTDEVTHIVAENLSRSEVLAWLKEHKMEKTKQFELLDISWLIESMKVGKPVDTKGKYQLAESVEVSANPDPTEGRVNELPPTMKTVSPYACQRRTTLNNRNQRFTDSLEILRENYELKGNDDTALEFRRAISVLKSLPFEVRSLKDTEGLPWISDEVKGIMEEIIEVGESREVQAVLNDEWYQSFHAFTRVFGVGVKTADKWYRMGLRTLEDVRSSKTLKLTPWQKVGLLYYEDLARGVTRAEADAIWLLVQDAVATFDPDAIVEIVGGQRRGKPQGHDVDLLISSPGAEKEQEDQLLGKVMNLWKKQGLLLCGRLEWSQWEWGGLPSLKADEGDAEASCFLILKLYDHLVRKSKRNMPTGSNMGESKPWKAIKVDLLRCPRGSFAFAMLQWTGSRMFRRDLRWYALEEKNMMLDNHSLYDMTRGIQLPAKSEEEIFEHLGLEYLEPFERNA

SEQ ID NO: 4833 - DNA, 1584 bp, synthetic construct
  misc_feature 1..1584: note = Variant of terminal deoxynucleotidyltransferase
  source 1..1584: mol_type = other DNA
atgcaccatcatcatcatggcggtagcggcagccacggcattcgtaccatcgattcggacttcgggaagaaacagcagaaaaaaggcgataaccacgatagttccgccacttatgaaatcaaatttcacgagtttgtgctgttcattctcgaagaaaaaatgggtgcgacgcgtcgtacttttctgacagatttagcccgcaagaaagggttccgcgtcgagaatgaactgaccgacgaagttacccacatcgtggcagaaaatctgtcacgctctgaagtattggcttggctgaaagaacacaagatggagaagaccaagcaattcgaactgctggatattagctggcttatcgaaagcatgaaagttggtaaaccggtggacaccaaggggaaataccagttggcggaatcggttgaggtgagtgcgaacccagatccgacagaaggtcgtgtaaacgagctgcctcctactatgaaaaccgtttctccgtatgcgtgtcaacgccgcaccaccctgaacaaccgtaatcaacgttttacggactcgctggagattcttcgtgaaaattacgagctgaaaggcaacgacgatactgcgctggaatttcgtcgtgctatctccgtgctgaaaagccttccgtttgaggtacgtagcctgaaagacacggaaggattgccctggatcagtgatgaagtcaaagggattatggaagaaatcatcgaagtcggggagtcgcgtgaagtgcaggccgtgctcaatgatgagtggtatcaaagcttccacgcatttacgcgtgtctttggagtgggggtgaagacagcagacaagtggtaccgcatgggtctgcgcaccctcgaggatgttcgttccagcaagaccctgaagttgaccccgtggcagaaagtaggtctgctgtattatgaagatcttgctcgcggcgttacgcgtgccgaagctgacgcgatttggctgctggttcaggatgcagtcgcaactttcgacccggatgcgatcgtggagattgtcggtggacagcgtcgtgggaaacctcagggtcacgacgttgatctgcttatcagttctccgggagctgaaaaagagcaagaagaccaactcctgcagaaagtgatgaatctgtggaagaaacaagggttgttgctgtgtggtcgtctggaaaccagtcagtgggaatgggggggtctgccgtccggtaaggctgatgagggtgacgcggaggcgtcgtgctttctgatcctcaaactttatgatcatctggtgcgtaaaagtaaacgcaatatgccgactggttcgaacatgggcgagtccaaaccgtggaaagcaattaaagtagatctgctgcgttgcccccgcggcagttttgcgtttgcgatgttgcagtggaccggaagccgcatgttccgtcgtgatctgcgctggtacgccctggaagagaagaacatgatgctggacaatcattcgctgtatgacatgactcgtggtatccaactccctgctaaatcggaagaggaaattttcgaacatctggggcttgaatacctggaaccgttcgaacgtaacgca

SEQ ID NO: 4834 - protein, 528 aa, synthetic construct
  REGION 1..528: note = Variant of terminal deoxynucleotidyltransferase
MHHHHHGGSGSHGIRTIDSDFGKKQQKKGDNHDSSATYEIKFHEFVLFILEEKMGATRRTFLTDLARKKGFRVENELTDEVTHIVAENLSRSEVLAWLKEHKMEKTKQFELLDISWLIESMKVGKPVDTKGKYQLAESVEVSANPDPTEGRVNELPPTMKTVSPYACQRRTTLNNRNQRFTDSLEILRENYELKGNDDTALEFRRAISVLKSLPFEVRSLKDTEGLPWISDEVKGIMEEIIEVGESREVQAVLNDEWYQSFHAFTRVFGVGVKTADKWYRMGLRTLEDVRSSKTLKLTPWQKVGLLYYEDLARGVTRAEADAIWLLVQDAVATFDPDAIVEIVGGQRRGKPQGHDVDLLISSPGAEKEQEDQLLQKVMNLWKKQGLLLCGRLETSQWEWGGLPSGKADEGDAEASCFLILKLYDHLVRKSKRNMPTGSNMGESKPWKAIKVDLLRCPRGSFAFAMLQWTGSRMFRRDLRWYALEEKNMMLDNHSLYDMTRGIQLPAKSEEEIFEHLGLEYLEPFERNA

SEQ ID NO: 4835 - DNA, 1584 bp, synthetic construct
  misc_feature 1..1584: note = Variant of terminal deoxynucleotidyltransferase
  source 1..1584: mol_type = other DNA
atgcaccatcatcatcatggcggtagcggcagccacggcattcgtaccatcgattcggacttcgggaagaaacagcagaaaaaaggcgataaccacgatagttccgccacttatgaaatcaaatttcacgagtttgtgctgttcattctcgaagaaaaaatgggtgcgacgcgtcgtacttttctgacagatttagcccgcaagaaagggttccgcgtcgagaatgaactgaccgacgaagttacccacatcgtggcagaaaatctgtcacgctctgaagtattggcttggctgaaagaacacaagatggagaagaccaagcaattcgaactgctggatattagctggcttatcgaaagcatgaaagttggtaaaccggtggacaccaaggggaaataccagttggcggaatcggttgaggtgagtgcgaacccagatccgacagaaggtcgtgtaaacgagctgcctcctactatgaaaaccgtttctccgtatgcgtgtcaacgccgcaccaccctgaacaaccgtaatcaacgttttacggactcgctggagattcttcgcgaaatgtacgagctgaaaggcaacgacgatactgcgctggaatttcgtcgtgctatctccgtgctgaaaagccttccgtttgaggtacgtagcctgaaagacacggaaggattgccctggatcagtgatgaagtcaaagggattatggaagaaatcatcgaagtcggggagtcgcgtgaagtgcaggccgtgctcaatgatgagtggtatcaaagcttccacgcatttacgcgtgtctttggagtgggggtgaagacagcagacaagtggtaccgcatgggtctgcgcaccctcgaggatgttcgttccagcaagaccctgaagttgaccccgtggcagaaagtaggtctgctgtattacgaagatcttgctcgcggcgttacgcgtgccgaagctgacgcgatttggctgctggttcaggatgcagtcgcaactttcgacccggatgcgatcgtggagattgtcggtggacagcgtcgtgggaaacctcagggtcacgacgttgatctgcttatcagttctccgggagctgaaaaagagcaagaagaccaactcctgggcaaagtgatgaatctgtggaagaaacaagggttgttgctgtgtggtcgtctggaatggagtcagtgggaatgggggggtctgccttccgggaaagctgatgagggtgacgcggaggcgtcgtgctttctgatcctcaaactttatgatcatctggtgcgtaaaagtaaacgcaatatgccgactggttcgaacatgggcgagtccaaaccgtggaaagcaattaaagtagatctgctgcgttgcccccgcggcagttttgcgtttgcgatgttgcagtggaccggaagccgcatgttccgtcgtgatctgcgctggtacgccctggaagagaagaacatgatgctggacaatcattcgctgtatgacatgactcgtggtatccaactccctgctaaatcggaagaggaaattttcgaacatctggggcttgaatacctggaaccgttcgaacgtaacgca

SEQ ID NO: 4836 - protein, 528 aa, synthetic construct
  REGION 1..528: note = Variant of terminal deoxynucleotidyltransferase
MHHHHHGGSGSHGIRTIDSDFGKKQQKKGDNHDSSATYEIKFHEFVLFILEEKMGATRRTFLTDLARKKGFRVENELTDEVTHIVAENLSRSEVLAWLKEHKMEKTKQFELLDISWLIESMKVGKPVDTKGKYQLAESVEVSANPDPTEGRVNELPPTMKTVSPYACQRRTTLNNRNQRFTDSLEILREMYELKGNDDTALEFRRAISVLKSLPFEVRSLKDTEGLPWISDEVKGIMEEIIEVGESREVQAVLNDEWYQSFHAFTRVFGVGVKTADKWYRMGLRTLEDVRSSKTLKLTPWQKVGLLYYEDLARGVTRAEADAIWLLVQDAVATFDPDAIVEIVGGQRRGKPQGHDVDLLISSPGAEKEQEDQLLGKVMNLWKKQGLLLCGRLEWSQWEWGGLPSGKADEGDAEASCFLILKLYDHLVRKSKRNMPTGSNMGESKPWKAIKVDLLRCPRGSFAFAMLQWTGSRMFRRDLRWYALEEKNMMLDNHSLYDMTRGIQLPAKSEEEIFEHLGLEYLEPFERNA

SEQ ID NO: 4837 - DNA, 1584 bp, synthetic construct
  misc_feature 1..1584: note = Variant of terminal deoxynucleotidyltransferase
  source 1..1584: mol_type = other DNA
atgcaccatcatcatcatggcggtagcggcagccacggcattcgtaccatcgattcggacttcgggaagaaacagcagaaaaaaggcgataaccacgatagttccgccacttatgaaatcaaatttcacgagtttgtgctgttcattctcgaagaaaaaatgggtgcgacgcgtcgtacttttctgacagatttagcccgcaagaaagggttccgcgtcgagaatgaactgaccgacgaagttacccacatcgtggcagaaaatctgtcacgctctgaagtattggcttggctgaaagaacacaagatggagaagaccaagcaattcgaactgctggatattagctggcttatcgaaagcatgaaagttggtaaaccggtggacaccaaggggaaataccagttggcggaatcggttgaggtgagtgcgaacccagatccgacagaaggtcgtgtaaacgagctgcctcctactatgaaaaccgtttctccgtatgcgtgtcaacgccgcaccaccctgaacaaccgtaatcaacgttttacggactcgctggagattcttcgcgaaatgtacgagctgaaaggcaacgacgatactgcgctggaatttcgtcgtgctatctccgtgctgaaaagccttccgtttgaggtacgtagcctgaaagacacggaaggattgccctggatcagtgatgaagtcaaagggattatggaagaaatcatcgaagtcggggagtcgcgtgaagtgcaggccgtgctcaatgatgagtggtatcaaagcttccacgcatttacgcgtgtctttggagtgggggtgaagacagcagacaagtggtaccgcatgggtctgcgcaccctcgaggatgttcgttccagcaagaccctgaagttgaccccgtggcagaaagtaggtctgctgtattacgaagatcttgctcgcggcgttacgcgtgccgaagctgacgcgatttggctgctggttcaggatgcagtcgcaactttcgacccggatgcgatcgtggagattgtcggtggacagcgtcgtgggaaacctcagggtcacgacgttgatctgcttatcagttctccgggagctgaaaaagagcaagaagaccaactcctgggcaaagtgatgaatgtatggaagaaacaagggttgttgctgtgtggtcgtctggaatggagtcagtgggaatgggggggtctgccttccgggaaagctgatgagggtgacgcggaggcgtcgtgctttctgatcctcaaactttatgatcatctggtgcgtaaaagtaaacgcaatatgccgactggttcgaacatgggcgagtccaaaccgtggaaagcaattaaagtagatctgctgcgttgcccccgcggcagttttgcgtttgcgatgttgcagtggaccggaagccgcatgttccgtcgtgatctgcgctggtacgccctggaagagaagaacatgatgctggacaatcattcgctgtatgacatgactcgtggtatccaactccctgctaaatcggaagaggaaattttcgaacatctggggcttgaatacctggaaccgttcgaacgtaacgca

SEQ ID NO: 4838 - protein, 528 aa, synthetic construct
  REGION 1..528: note = Variant of terminal deoxynucleotidyltransferase
MHHHHHGGSGSHGIRTIDSDFGKKQQKKGDNHDSSATYEIKFHEFVLFILEEKMGATRRTFLTDLARKKGFRVENELTDEVTHIVAENLSRSEVLAWLKEHKMEKTKQFELLDISWLIESMKVGKPVDTKGKYQLAESVEVSANPDPTEGRVNELPPTMKTVSPYACQRRTTLNNRNQRFTDSLEILREMYELKGNDDTALEFRRAISVLKSLPFEVRSLKDTEGLPWISDEVKGIMEEIIEVGESREVQAVLNDEWYQSFHAFTRVFGVGVKTADKWYRMGLRTLEDVRSSKTLKLTPWQKVGLLYYEDLARGVTRAEADAIWLLVQDAVATFDPDAIVEIVGGQRRGKPQGHDVDLLISSPGAEKEQEDQLLGKVMNVWKKQGLLLCGRLEWSQWEWGGLPSGKADEGDAEASCFLILKLYDHLVRKSKRNMPTGSNMGESKPWKAIKVDLLRCPRGSFAFAMLQWTGSRMFRRDLRWYALEEKNMMLDNHSLYDMTRGIQLPAKSEEEIFEHLGLEYLEPFERNA

SEQ ID NO: 4839 - DNA, 1584 bp, synthetic construct
  misc_feature 1..1584: note = Variant of terminal deoxynucleotidyltransferase
  source 1..1584: mol_type = other DNA
atgcaccatcatcatcatggcggtagcggcagccacggcattcgtaccatcgattcggacttcgggaagaaacagcagaaaaaaggcgataaccacgatagttccgccacttatgaaatcaaatttcacgagtttgtgctgttcattctcgaagaaaaaatgggtgcgacgcgtcgtacttttctgacagatttagcccgcaagaaagggttccgcgtcgagaatgaactgaccgacgaagttacccacatcgtggcagaaaatctgtcacgctctgaagtattggcttggctgaaagaacacaagatggagaagaccaagcaattcgaactgctggatattagctggcttatcgaaagcatgaaagttggtaaaccggtggacaccaaggggaaataccagttggcggaatcggttgaggtgagtgcgaacccagatccgacagaaggtcgtgtaaacgagctgcctcctactatgaaaaccgtttctccgtatgcgtgtcaacgccgcaccaccctgaacaaccgtaatcaacgttttacggactcgctggagattcttcgtgaaaattacgagctgaaaggcaacgacgatactgcgctggaatttcgtcgtgctatctccgtgctgaaaagccttccgtttgaggtacgtagcctgaaagacacggaaggattgccctggatcagtgatgaagtcaaagggattatggaagaaatcatcgaagtcggggagtcgcgtgaagtgcaggccgtgctcaatgatgagtggtatcaaagcttccacgcatttacgcgtgtctttggagtgggggtgaagacagcagacaagtggtaccgcatgggtctgcgcaccctcgaggatgttcgttccagcaagaccctgaagttgaccccgtggcagaaagtaggtctgctgtattacgaagatcttgctcgcggcgttacgcgtgccgaagctgacgcgatttggctgctggttcaggatgcagtcgcaactttcgacccggatgcgatcgtggagattgtcggtggacagcgtcgtgggaaacctcagggtcacgacgttgatctgcttatcagttctccgggagctgaaaaagagcaagaagaccaactcctgggcaaagtgatgaatgtatggaagaaacaagggttgttgctgtgtggtcgtctggaatggagtcagtgggaatgggggggtctgccgtccggtaaggctgatgagggtgacgcggaggcgtcgtgctttctgatcctcaaactttatgatcatctggtgcgtaaaagtaaacgcaatatgccgactggttcgaacatgggcgagtccaaaccgtggaaagcaattaaagtagatctgctgcgttgcccccgcggcagttttgcgtttgcgatgttgcagtggaccggaagccgcatgttccgtcgtgatctgcgctggtacgccctggaagagaagaacatgatgctggacaatcattcgctgtatgacatgactcgtggtatccaactccctgctaaatcggaagaggaaattttcgaacatctggggcttgaatacctggaaccgttcgaacgtaacgca

SEQ ID NO: 4840 - protein, 528 aa, synthetic construct
  REGION 1..528: note = Variant of terminal deoxynucleotidyltransferase
MHHHHHGGSGSHGIRTIDSDFGKKQQKKGDNHDSSATYEIKFHEFVLFILEEKMGATRRTFLTDLARKKGFRVENELTDEVTHIVAENLSRSEVLAWLKEHKMEKTKQFELLDISWLIESMKVGKPVDTKGKYQLAESVEVSANPDPTEGRVNELPPTMKTVSPYACQRRTTLNNRNQRFTDSLEILRENYELKGNDDTALEFRRAISVLKSLPFEVRSLKDTEGLPWISDEVKGIMEEIIEVGESREVQAVLNDEWYQSFHAFTRVFGVGVKTADKWYRMGLRTLEDVRSSKTLKLTPWQKVGLLYYEDLARGVTRAEADAIWLLVQDAVATFDPDAIVEIVGGQRRGKPQGHDVDLLISSPGAEKEQEDQLLGKVMNVWKKQGLLLCGRLEWSQWEWGGLPSGKADEGDAEASCFLILKLYDHLVRKSKRNMPTGSNMGESKPWKAIKVDLLRCPRGSFAFAMLQWTGSRMFRRDLRWYALEEKNMMLDNHSLYDMTRGIQLPAKSEEEIFEHLGLEYLEPFERNA

SEQ ID NO: 4841 - DNA, 1584 bp, synthetic construct
  misc_feature 1..1584: note = Variant of terminal deoxynucleotidyltransferase
  source 1..1584: mol_type = other DNA
atgcaccatcatcatcatggcggtagcggcagccacggcattcgtaccatcgattcggacttcgggaagaaacagcagaaaaaaggcgataaccacgatagttccgccacttatgaaatcaaatttcacgagtttgtgctgttcattctcgaagaaaaaatgggtgcgacgcgtcgtacttttctgacagatttagcccgcaagaaagggttccgcgtcgagaatgaactgaccgacgaagttacccacatcgtggcagaaaatctgtcacgctctgaagtattggcttggctgaaagaacacaagatggagaagaccaagcaattcgaactgctggatattagctggcttatcgaaagcatgaaagttggtaaaccggtggacaccaaggggaaataccagttggcggaatcggttgaggtgagtgcgaacccagatccgacagaaggtcgtgtaaacgagctgcctcctactatgaaaaccgtttctccgtatgcgtgtcaacgccgcaccaccctgaacaaccgtaatcaacgttttacggactcgctggagattcttcgcgaaatgtacgagctgaaaggcaacaacgatactgcgctggaatttcgtcgtgctatctccgtgctgaaaagccttccgtttgaggtacgtagcctgaaagacacggaaggattgccctggatcagtgatgaagtcaaagggattatggaagaaatcatcgaagtcggggagtcgcgtgaagtgcaggccgtgctcaatgatgagtggtatcaaagcttccacgcatttacgcgtgtctttggagtgggggtgaagacagcagacaagtggtaccgcatgggtctgcgcaccctcgaggatgttcgttccagcaagaccctgaagttgaccccgtggcagaaagtaggtctgctgtatcaggaagatcttgctcgcggcgttacgcgtgccgaagctgacgcgatttggctgctggttcaggatgcagtcgcaactttcgacccggatgcgatcgtggagattgtcggtggacagcgtcgtgggaaacctcagggtcacgacgttgatctgcttatcagttctccgggagctgaaaaagagcaagaagaccaactcctgcagaaagtgatgaatctgtggaagaaacaagggttgttgctgtgtggtcgtctggaatggagtcagtgggaatgggggggtctgccgtccggtaaggctgatgagggtgacgcggaggcgtcgtgctttctgatcctcaaactttatgatcatctggtgcgtaaaagtaaacgcaatatgccgactggttcgaacatgggcgagtccaaaccgtggaaagcaattaaagtagatctgctgcgttgcccccgcggcagttttgcgtttgcgatgttgcagtggaccggaagccgcatgttccgtcgtgatctgcgctggtacgccctggaagagaagaacatgatgctggacaatcattcgctgtatgacatgactcgtggtatccaactccctgctaaatcggaagaggaaattttcgaacatctggggcttgaatacctggaaccgttcgaacgtaacgca

SEQ ID NO: 4842 - protein, 528 aa, synthetic construct
  REGION 1..528: note = Variant of terminal deoxynucleotidyltransferase
MHHHHHGGSGSHGIRTIDSDFGKKQQKKGDNHDSSATYEIKFHEFVLFILEEKMGATRRTFLTDLARKKGFRVENELTDEVTHIVAENLSRSEVLAWLKEHKMEKTKQFELLDISWLIESMKVGKPVDTKGKYQLAESVEVSANPDPTEGRVNELPPTMKTVSPYACQRRTTLNNRNQRFTDSLEILREMYELKGNNDTALEFRRAISVLKSLPFEVRSLKDTEGLPWISDEVKGIMEEIIEVGESREVQAVLNDEWYQSFHAFTRVFGVGVKTADKWYRMGLRTLEDVRSSKTLKLTPWQKVGLLYQEDLARGVTRAEADAIWLLVQDAVATFDPDAIVEIVGGQRRGKPQGHDVDLLISSPGAEKEQEDQLLQKVMNLWKKQGLLLCGRLEWSQWEWGGLPSGKADEGDAEASCFLILKLYDHLVRKSKRNMPTGSNMGESKPWKAIKVDLLRCPRGSFAFAMLQWTGSRMFRRDLRWYALEEKNMMLDNHSLYDMTRGIQLPAKSEEEIFEHLGLEYLEPFERNA

SEQ ID NO: 4843 - DNA, 1584 bp, synthetic construct
  misc_feature 1..1584: note = Variant of terminal deoxynucleotidyltransferase
  source 1..1584: mol_type = other DNA
atgcaccatcatcatcatggcggtagcggcagccacggcattcgtaccatcgattcggacttcgggaagaaacagcagaaaaaaggcgataaccacgatagttccgccacttatgaaatcaaatttcacgagtttgtgctgttcattctcgaagaaaaaatgggtgcgacgcgtcgtacttttctgacagatttagcccgcaagaaagggttccgcgtcgagaatgaactgaccgacgaagttacccacatcgtggcagaaaatctgtcacgctctgaagtattggcttggctgaaagaacacaagatggagaagaccaagcaattcgaactgctggatattagctggcttatcgaaagcatgaaagttggtaaaccggtggacaccaaggggaaataccagttggcggaatcggttgaggtgagtgcgaacccagatccgacagaaggtcgtgtaaacgagctgcctcctactatgaaaaccgtttctccgtatgcgtgtcaacgccgcaccaccctgaacaaccgtaatcaacgttttacggactcgctggagattcttcgcgaaatgtacgagctgaaaggcaacgacgatactgcgctggaatttcgtcgtgctatctccgtgctgaaaagccttccgtttgaggtacgtagcctgaaagacacggaaggattgccctggatcagtgatgaagtcaaagggattatggaagaaatcatcgaagtcggggagtcgcgtgaagtgcaggccgtgctcaatgatgagtggtatcaaagcttccacgcatttacgcgtgtctttggagtgggggtgaagacagcagacaagtggtaccgcatgggtctgcgcaccctcgaggatgttcgttccagcaagaccctgaagttgaccccgtggcagaaagtaggtctgctgtatcaggaagatcttgctcgcggcgttacgcgtgccgaagctgacgcgatttggctgctggttcaggatgcagtcgcaactttcgacccggatgcgatcgtggagattgtcggtggacagcgtcgtgggaaacctcagggtcacgacgttgatctgcttatcagttctccgggagctgaaaaagagcaagaagaccaactcctgcagaaagtgatgaatgtatggaagaaacaagggttgttgctgtgtggtcgtctggaatggagtcagtgggaatgggggggtctgccttccctgaaagctgatgagggtgacgcggaggcgtcgtgctttctgatcctcaaactttatgatcatctggtgcgtaaaagtaaacgcaatatgccgactggttcgaacatgggcgagtccaaaccgtggaaagcaattaaagtagatctgctgcgttgcccccgcggcagttttgcgtttgcgatgttgcagtggaccggaagccgcatgttccgtcgtgatctgcgctggtacgccctggaagagaagaacatgatgctggacaatcattcgctgtatgacatgactcgtggtatccaactccctgctaaatcggaagaggaaattttcgaacatctggggcttgaatacctggaaccgttcgaacgtaacgca

SEQ ID NO: 4844 - protein, 528 aa, synthetic construct
  REGION 1..528: note = Variant of terminal deoxynucleotidyltransferase
MHHHHHGGSGSHGIRTIDSDFGKKQQKKGDNHDSSATYEIKFHEFVLFILEEKMGATRRTFLTDLARKKGFRVENELTDEVTHIVAENLSRSEVLAWLKEHKMEKTKQFELLDISWLIESMKVGKPVDTKGKYQLAESVEVSANPDPTEGRVNELPPTMKTVSPYACQRRTTLNNRNQRFTDSLEILREMYELKGNDDTALEFRRAISVLKSLPFEVRSLKDTEGLPWISDEVKGIMEEIIEVGESREVQAVLNDEWYQSFHAFTRVFGVGVKTADKWYRMGLRTLEDVRSSKTLKLTPWQKVGLLYQEDLARGVTRAEADAIWLLVQDAVATFDPDAIVEIVGGQRRGKPQGHDVDLLISSPGAEKEQEDQLLQKVMNVWKKQGLLLCGRLEWSQWEWGGLPSLKADEGDAEASCFLILKLYDHLVRKSKRNMPTGSNMGESKPWKAIKVDLLRCPRGSFAFAMLQWTGSRMFRRDLRWYALEEKNMMLDNHSLYDMTRGIQLPAKSEEEIFEHLGLEYLEPFERNA

SEQ ID NO: 4845 - DNA, 1584 bp, synthetic construct
  misc_feature 1..1584: note = Variant of terminal deoxynucleotidyltransferase
  source 1..1584: mol_type = other DNA
atgcaccatcatcatcatggcggtagcggcagccacggcattcgtaccatcgattcggacttcgggaagaaacagcagaaaaaaggcgataaccacgatagttccgccacttatgaaatcaaatttcacgagtttgtgctgttcattctcgaagaaaaaatgggtgcgacgcgtcgtacttttctgacagatttagcccgcaagaaagggttccgcgtcgagaatgaactgaccgacgaagttacccacatcgtggcagaaaatctgtcacgctctgaagtattggcttggctgaaagaacacaagatggagaagaccaagcaattcgaactgctggatattagctggcttatcgaaagcatgaaagttggtaaaccggtggacaccaaggggaaataccagttggcggaatcggttgaggtgagtgcgaacccagatccgacagaaggtcgtgtaaacgagctgcctcctactatgaaaaccgtttctccgtatgcgtgtcaacgccgcaccaccctgaacaaccgtaatcaacgttttacggactcgctggagattcttcgtgaaaattacgagctgaaaggcaacgacgatactgcgctggaatttcgtcgtgctatctccgtgctgaaaagccttccgtttgaggtacgtagcctgaaagacacggaaggattgccctggatcagtgatgaagtcaaagggattatggaagaaatcatcgaagtcggggagtcgcgtgaagtgcaggccgtgctcaatgatgagtggtatcaaagcttccacgcatttacgcgtgtctttggagtgggggtgaagacagcagacaagtggtaccgcatgggtctgcgcaccctcgaggatgttcgttccagcaagaccctgaagttgaccccgtggcagaaagtaggtctgctgtattatgaagatcttgctcgcggcgttacgcgtgccgaagctgacgcgatttggctgctggttcaggatgcagtcgcaactttcgacccggatgcgatcgtggagattgtcggtggacagcgtcgtgggaaacctcagggtcacgacgttgatctgcttatcagttctccgggagctgaaaaagagcaagaagaccaactcctgcagaaagtgatgaatgtatggaagaaacaagggttgttgctgtgtggtcgtctggaatggagtcagtgggaatgggggggtctgccgtccggtaaggctgatgagggtgacgcggaggcgtcgtgctttctgatcctcaaactttatgatcatctggtgcgtaaaagtaaacgcaatatgccgactggttcgaacatgggcgagtccaaaccgtggaaagcaattaaagtagatctgctgcgttgcccccgcggcagttttgcgtttgcgatgttgcagtggaccggaagccgcatgttccgtcgtgatctgcgctggtacgccctggaagagaagaacatgatgctggacaatcattcgctgtatgacatgactcgtggtatccaactccctgctaaatcggaagaggaaattttcgaacatctggggcttgaatacctggaaccgttcgaacgtaacgca

SEQ ID NO: 4846 - protein, 528 aa, synthetic construct
  REGION 1..528: note = Variant of terminal deoxynucleotidyltransferase
MHHHHHGGSGSHGIRTIDSDFGKKQQKKGDNHDSSATYEIKFHEFVLFILEEKMGATRRTFLTDLARKKGFRVENELTDEVTHIVAENLSRSEVLAWLKEHKMEKTKQFELLDISWLIESMKVGKPVDTKGKYQLAESVEVSANPDPTEGRVNELPPTMKTVSPYACQRRTTLNNRNQRFTDSLEILRENYELKGNDDTALEFRRAISVLKSLPFEVRSLKDTEGLPWISDEVKGIMEEIIEVGESREVQAVLNDEWYQSFHAFTRVFGVGVKTADKWYRMGLRTLEDVRSSKTLKLTPWQKVGLLYYEDLARGVTRAEADAIWLLVQDAVATFDPDAIVEIVGGQRRGKPQGHDVDLLISSPGAEKEQEDQLLQKVMNVWKKQGLLLCGRLEWSQWEWGGLPSGKADEGDAEASCFLILKLYDHLVRKSKRNMPTGSNMGESKPWKAIKVDLLRCPRGSFAFAMLQWTGSRMFRRDLRWYALEEKNMMLDNHSLYDMTRGIQLPAKSEEEIFEHLGLEYLEPFERNA

SEQ ID NO: 4847 - DNA, 1584 bp, synthetic construct
  misc_feature 1..1584: note = Variant of terminal deoxynucleotidyltransferase
  source 1..1584: mol_type = other DNA
atgcaccatcatcatcatggcggtagcggcagccacggcattcgtaccatcgattcggacttcgggaagaaacagcagaaaaaaggcgataaccacgatagttccgccacttatgaaatcaaatttcacgagtttgtgctgttcattctcgaagaaaaaatgggtgcgacgcgtcgtacttttctgacagatttagcccgcaagaaagggttccgcgtcgagaatgaactgaccgacgaagttacccacatcgtggcagaaaatctgtcacgctctgaagtattggcttggctgaaagaacacaagatggagaagaccaagcaattcgaactgctggatattagctggcttatcgaaagcatgaaagttggtaaaccggtggacaccaaggggaaataccagttggcggaatcggttgaggtgagtgcgaacccagatccgacagaaggtcgtgtaaacgagctgcctcctactatgaaaaccgtttctccgtatgcgtgtcaacgccgcaccaccctgaacaaccgtaatcaacgttttacggactcgctggagattcttcgtgaaaattacgagctgaaaggcaacgacgatactgcgctggaatttcgtcgtgctatctccgtgctgaaaagccttccgtttgaggtacgtagcctgaaagacacggaaggattgccctggatcagtgatgaagtcaaagggattatggaagaaatcatcgaagtcggggagtcgcgtgaagtgcaggccgtgctcaatgatgagtggtatcaaagcttccacgcatttacgcgtgtctttggagtgggggtgaagacagcagacaagtggtaccgcatgggtctgcgcaccctcgaggatgttcgttccagcaagaccctgaaattgaccccgtggcagaaagtaggtctgctgtattatgaagatcttgctcgcggcgttacgcgtgaagaagctgacgcgatttggctgctggttcaggatgcagtcgcaactttcgacccggatgcgatcgtggagattgtcggtggacagcgtcgtgggaaacctcagggtcacgacgttgatctgcttatcagttctccgggagctgaaaaagagcaagaagaccaactcctgcagaaagtgatgaatctgtggaagaaacaagggttgttgctgtgtggtcgtctggaatggagtcagtgggaatgggggggtctgccgtccggtaaggctgatgagggtgacgcggaggcgtcgtgctttctgatcctcaaactttatgatcatctggtgcgtaaaagtaaacgcaatatgccgactggttcgaacatgggcgagtccaaaccgtggaaagcaattaaagtagatctgctgcgttgcccccgcggcagttttgcgtttgcgatgttgcagtggaccggaagccgcatgttccgtcgtgatctgcgctggtacgccctggaagagaagaacatgatgctggacaatcattcgctgtatgacatgactcgtggtatccaactccctgctaaatcggaagaggaaattttcgaacatctggggcttgaatacctggaaccgttcgaacgtaacgca

SEQ ID NO: 4848 - protein, 528 aa, synthetic construct
  REGION 1..528: note = Variant of terminal deoxynucleotidyltransferase
MHHHHHGGSGSHGIRTIDSDFGKKQQKKGDNHDSSATYEIKFHEFVLFILEEKMGATRRTFLTDLARKKGFRVENELTDEVTHIVAENLSRSEVLAWLKEHKMEKTKQFELLDISWLIESMKVGKPVDTKGKYQLAESVEVSANPDPTEGRVNELPPTMKTVSPYACQRRTTLNNRNQRFTDSLEILRENYELKGNDDTALEFRRAISVLKSLPFEVRSLKDTEGLPWISDEVKGIMEEIIEVGESREVQAVLNDEWYQSFHAFTRVFGVGVKTADKWYRMGLRTLEDVRSSKTLKLTPWQKVGLLYYEDLARGVTREEADAIWLLVQDAVATFDPDAIVEIVGGQRRGKPQGHDVDLLISSPGAEKEQEDQLLQKVMNLWKKQGLLLCGRLEWSQWEWGGLPSGKADEGDAEASCFLILKLYDHLVRKSKRNMPTGSNMGESKPWKAIKVDLLRCPRGSFAFAMLQWTGSRMFRRDLRWYALEEKNMMLDNHSLYDMTRGIQLPAKSEEEIFEHLGLEYLEPFERNA

SEQ ID NO: 4849 - DNA, 1587 bp, synthetic construct
  misc_feature 1..1587: note = Variant of terminal deoxynucleotidyltransferase
  source 1..1587: mol_type = other DNA
atgcaccatcatcatcatcatggcggtagcggcagccacggcattcgtaccatcgattcggacttcgggaagaaacagcagaaaaaaggcgataaccacgatagttccgccacttatgaaatcaaatttcacgagtttgtgctgttcattctcgaagaaaaaatgggtgcgacgcgtcgtacttttctgacagatttagcccgcaagaaagggttccgcgtcgagaatgaactgaccgacgaagttacccacatcgtggcagaaaatctgtcacgctctgaagtattggcttggctgaaagaacacaagatggagaagaccaagcaattcgaactgctggatattagctggcttatcgaaagcatgaaagttggtaaaccggtggacaccaaggggaaataccagttggcggaatcggttgaggtgagtgcgaacccagatccgacagaaggtcgtgtaaacgagctgcctcctactatgaaaaccgtttctccgtatgcgtgtcaacgccgcaccaccctgaacaaccgtaatcaacgttttacggactcgctggagattcttcgtgaaaattacgagctgaaaggcaacgacgatactgcgctggaatttcgtcgtgctatctccgtgctgaaaagccttccgtttgaggtacgtagcctgaaagacacggaaggattgccctggatcagtgatgaagtcaaagggattatggaagaaatcatcgaagtcggggagtcgcgtgaagtgcaggccgtgctcaatgatgagtggtatcaaagcttccacgcatttacgcgtgtctttggagtgggggtgaagacagcagacaagtggtaccgcatgggtctgcgcaccctcgaggatgttcgttccagcaagaccctgaagttgaccccgtggcagaaagtaggtctgctgtattatgaagatcttgctcgcggcgttacgcgtgcggaagctgacgcgatttggctgctggttcaggatgcagtcgcaactttcgacccggatgcgatcgtggagattgtcggtggacagcgtcgtgggaaacctcagggtcacgacgttgatctgcttatcagttctccgggagctgaaaaagagcaagaagaccaactcctgcagaaagtgatgaatctgtggaagaaacaagggttgttgctgtgtggtcgtctggaatggagtcagtgggaatgggggggtctgccgtccggtaaggctgatgagggtgacgcggaggcgtcgtgctttctgatcctcaaactttatgatcatctggtgcgtaaaagtaaacgcaatatgccgactggttcgaacatgggcgagtccaaaccgtggaaagcaattaaagtagatctgctgcgttgcccccgcggcagttttgcgtttgcgatgttgcagtggaccggaagccgcatgttccgtcgtgatctgcgcgattacgcccgcgaagagaagaacatgatgctggacaatcattcgctgtatgacatgactcgtggtatccaactccctgctaaatcggaagaggaaattttcgaacatctggggcttgaatacctggaaccgttcgaacgtaacgca

SEQ ID NO: 4850 - protein, 529 aa, synthetic construct
  REGION 1..529: note = Variant of terminal deoxynucleotidyltransferase
MHHHHHHGGSGSHGIRTIDSDFGKKQQKKGDNHDSSATYEIKFHEFVLFILEEKMGATRRTFLTDLARKKGFRVENELTDEVTHIVAENLSRSEVLAWLKEHKMEKTKQFELLDISWLIESMKVGKPVDTKGKYQLAESVEVSANPDPTEGRVNELPPTMKTVSPYACQRRTTLNNRNQRFTDSLEILRENYELKGNDDTALEFRRAISVLKSLPFEVRSLKDTEGLPWISDEVKGIMEEIIEVGESREVQAVLNDEWYQSFHAFTRVFGVGVKTADKWYRMGLRTLEDVRSSKTLKLTPWQKVGLLYYEDLARGVTRAEADAIWLLVQDAVATFDPDAIVEIVGGQRRGKPQGHDVDLLISSPGAEKEQEDQLLQKVMNLWKKQGLLLCGRLEWSQWEWGGLPSGKADEGDAEASCFLILKLYDHLVRKSKRNMPTGSNMGESKPWKAIKVDLLRCPRGSFAFAMLQWTGSRMFRRDLRDYAREEKNMMLDNHSLYDMTRGIQLPAKSEEEIFEHLGLEYLEPFERNA

SEQ ID NO: 4851 - DNA, 1587 bp, synthetic construct
  misc_feature 1..1587: note = Variant of terminal deoxynucleotidyltransferase
  source 1..1587: mol_type = other DNA
atgcaccatcatcatcatcatggcggtagcggcagccacggcattcgtaccatcgattcggacttcgggaagaaacagcagaaaaaaggcgataaccacgatagttccgccacttatgaaatcaaatttcacgagtttgtgctgttcattctcgaagaaaaaatgggtgcgacgcgtcgtacttttctgacagatttagcccgcaagaaagggttccgcgtcgagaatgaactgaccgacgaagttacccacatcgtggcagaaaatctgtcacgctctgaagtattggcttggctgaaagaacacaagatggagaagaccaagcaattcgaactgctggatattagctggcttatcgaaagcatgaaagttggtaaaccggtggacaccaaggggaaataccagttggcggaatcggttgaggtgagtgcgaacccagatccgacagaaggtcgtgtaaacgagctgcctcctactatgaaaaccgtttctccgtatgcgtgtcaacgccgcaccaccctgaacaaccgtaatcaacgttttacggactcgctggagattcttcgtgaaaattacgagctgaaaggcaacgacgatactgcgctggaatttcgtcgtgctatctccgtgctgaaaagccttccgtttgaggtacgtagcctgaaagacacggaaggattgccctggatcagtgatgaagtcaaagggattatggaagaaatcatcgaagtcggggagtcgcgtgaagtgcaggccgtgctcaatgatgagtggtatcaaagcttccacgcatttacgcgtgtctttggagtgggggtgaagacagcagacaagtggtaccgcatgggtctgcgcaccctcgaggatgttcgttccagcaagaccctgaagttcaccgaatggcagaaagtaggtctgctgtattatgaagatcttgctcgcggcgttacgcgtgcggaagctgacgcgatttggctgctggtccaggatgcagtcgcaactttcgacccggatgcgatcgtggagattgtcggtggacagcgtcgtgggaaacctcagggtcacgacgttgatctgcttatcagttctccgggagctgaaaaagagcaagaagaccaactcctgcagaaagtgatgaatctgtggaagaaacaagggttgttgctgtgtggtcgcctggaactgagtcagtgggaatgggggggtctgccgtccggtaaggctgatgagggtgacgcggaggcgtcgtgctttctgatcctcaaactttatgatcatctggtgcgtaaaagtaaacgcaatatgccgactggttcgaacatgggcgagtccaaaccgtggaaagcaattaaagtagatctgctgcgttgcccccgcggcagttttgcgtttgcgatgttgcagtggaccggaagccgcatgttccgtcgtgatctgcgcgattacgcccgcgaagagaagaacatgatgctggacaatcattcgctgtatgacatgactcgtggtatccaactccctgctaaatcggaagaggaaattttcgaacatctggggcttgaatacctggaaccgttcgaacgtaacgca

SEQ ID NO: 4852 - protein, 529 aa, synthetic construct
  REGION 1..529: note = Variant of terminal deoxynucleotidyltransferase
MHHHHHHGGSGSHGIRTIDSDFGKKQQKKGDNHDSSATYEIKFHEFVLFILEEKMGATRRTFLTDLARKKGFRVENELTDEVTHIVAENLSRSEVLAWLKEHKMEKTKQFELLDISWLIESMKVGKPVDTKGKYQLAESVEVSANPDPTEGRVNELPPTMKTVSPYACQRRTTLNNRNQRFTDSLEILRENYELKGNDDTALEFRRAISVLKSLPFEVRSLKDTEGLPWISDEVKGIMEEIIEVGESREVQAVLNDEWYQSFHAFTRVFGVGVKTADKWYRMGLRTLEDVRSSKTLKFTEWQKVGLLYYEDLARGVTRAEADAIWLLVQDAVATFDPDAIVEIVGGQRRGKPQGHDVDLLISSPGAEKEQEDQLLQKVMNLWKKQGLLLCGRLELSQWEWGGLPSGKADEGDAEASCFLILKLYDHLVRKSKRNMPTGSNMGESKPWKAIKVDLLRCPRGSFAFAMLQWTGSRMFRRDLRDYAREEKNMMLDNHSLYDMTRGIQLPAKSEEEIFEHLGLEYLEPFERNA

SEQ ID NO: 4853 - DNA, 1587 bp, synthetic construct
  misc_feature 1..1587: note = Variant of terminal deoxynucleotidyltransferase
  source 1..1587: mol_type = other DNA
atgcaccatcatcatcatcatggcggtagcggcagccacggcattcgtaccatcgattcggacttcgggaagaaacagcagaaaaaaggcgataaccacgatagttccgccacttatgaaatcaaatttcacgagtttgtgctgttcattctcgaagaaaaaatgggtgcgacgcgtcgtacttttctgacagatttagcccgcaagaaagggttccgcgtcgagaatgaactgaccgacgaagttacccacatcgtggcagaaaatctgtcacgctctgaagtattggcttggctgaaagaacacaagatggagaagaccaagcaattcgaactgctggatattagctggcttatcgaaagcatgaaagttggtaaaccggtggacaccaaggggaaataccagttggcggaatcggttgaggtgagtgcgaacccagatccgacagaaggtcgtgtaaacgagctgcctcctactatgaaaaccgtttctccgtatgcgtgtcaacgccgcaccaccctgaacaaccgtaatcaacgttttacggactcgctggagattcttcgtgaaaattacgagctgaaaggcaacgacgatactgcgctggaatttcgtcgtgctatctccgtgctgaaaagccttccgtttgaggtacgtagcctgaaagacacggaaggattgccctggatcagtgatgaagtcaaagggattatggaagaaatcatcgaagtcggggagtcgcgtgaagtgcaggccgtgctcaatgatgagtggtatcaaagcttccacgcatttacgcgtgtctttggagtgggggtgaagacagcagacaagtggtaccgcatgggtctgcgcaccctcgaggatgttcgttccagcaagaccctgaagttcaccgaatggcagaaagtaggtctgctgtattatgaagatcttgctcgcggcgttacgcgtgcggaagctgacgcgatttggctgctggctcaggatgcagtcgcaactttcgacccggatgcgatcgtggagattgtcggtggacagcgtcgtgggaaacctcagggtcacgacgttgatctgctgatcagttctccgggagctgaaaaagagcaagaagaccaactcctgcagaaagtgatgaatctgtggaagaaacaagggttgttgctgtgtggtcgcctggaactgagtcagtgggaatgggggggtctgccgtccggtaaggctgatgagggtgacgcggaggcgtcgtgctttctgatcctcaaactttatgatcatctggtgcgtaaaagtaaacgcaatatgccgactggttcgaacatgggcgagtccaaaccgtggaaagcaattaaagtagatctgctgcgttgcccccgcggcagttttgcgtttgcgatgttgcagtggaccggaagccgcatgttccgtcgtgatctgcgcgattacgcccgcgaagagaagaacatgatgctggacaatcattcgctgtatgacatgactcgtggtatccaactccctgctaaatcggaagaggaaattttcgaacatctggggcttgaatacctggaaccgttcgaacgtaacgca

SEQ ID NO: 4854 - protein, 529 aa, synthetic construct
  REGION 1..529: note = Variant of terminal deoxynucleotidyltransferase
MHHHHHHGGSGSHGIRTIDSDFGKKQQKKGDNHDSSATYEIKFHEFVLFILEEKMGATRRTFLTDLARKKGFRVENELTDEVTHIVAENLSRSEVLAWLKEHKMEKTKQFELLDISWLIESMKVGKPVDTKGKYQLAESVEVSANPDPTEGRVNELPPTMKTVSPYACQRRTTLNNRNQRFTDSLEILRENYELKGNDDTALEFRRAISVLKSLPFEVRSLKDTEGLPWISDEVKGIMEEIIEVGESREVQAVLNDEWYQSFHAFTRVFGVGVKTADKWYRMGLRTLEDVRSSKTLKFTEWQKVGLLYYEDLARGVTRAEADAIWLLAQDAVATFDPDAIVEIVGGQRRGKPQGHDVDLLISSPGAEKEQEDQLLQKVMNLWKKQGLLLCGRLELSQWEWGGLPSGKADEGDAEASCFLILKLYDHLVRKSKRNMPTGSNMGESKPWKAIKVDLLRCPRGSFAFAMLQWTGSRMFRRDLRDYAREEKNMMLDNHSLYDMTRGIQLPAKSEEEIFEHLGLEYLEPFERNA

SEQ ID NO: 4855 - DNA, 1587 bp, synthetic construct
  misc_feature 1..1587: note = Variant of terminal deoxynucleotidyltransferase
  source 1..1587: mol_type = other DNA
atgcaccatcatcatcatcatggcggtagcggcagccacggcattcgtaccatcgattcggacttcgggaagaaacagcagaaaaaaggcgataaccacgatagttccgccacttatgaaatcaaatttcacgagtttgtgctgttcattctcgaagaaaaaatgggtgcgacgcgtcgtacttttctgacagatttagcccgcaagaaagggttccgcgtcgagaatgaactgaccgacgaagttacccacatcgtggcagaaaatctgtcacgctctgaagtattggcttggctgaaagaacacaagatggagaagaccaagcaattcgaactgctggatattagctggcttatcgaaagcatgaaagttggtaaaccggtggacaccaaggggaaataccagttggcggaatcggttgaggtgagtgcgaacccagatccgacagaaggtcgtgtaaacgagctgcctcctactatgaaaaccgtttctccgtatgcgtgtcaacgccgcaccaccctgaacaaccgtaatcaacgttttacggactcgctggagattcttcgcgaaaattacgtgctgaaaggcaacgacgatactgcgctggaatttcgtcgtgctatctccgtgctgaaaagccttccgtttgaggtacgtagcctgaaagacacggaaggattgccctggatcagtgatgaagtcaaagggattatggaagaaatcatcgaagtcggggagtcgcgtgaagtgcaggccgtgctcaatgatgagtggtatcaaagcttccacgcatttacgcgtgtctttggagtgggggtgaagacagcagacaagtggtaccgcatgggtctgcgcaccctcgaggatgttcgttccagcaagaccctgaagttgaccccgtggcagaaagtaggtctgacgtattatgaagatcttgctcgcggcgttacgcgtgcggaagctgacgcgatttggctgctggttcaggatgcagtcgcaactttcgacccggatgcgatcgtggagattgtcggtggacagcgtcgtgggaaacctcagggtcacgacgttgatctgcttatcagttctccgggagctgaaaaagagcaagaagaccaactcctgcagaaagtgatgaatctgtggaagaaacaagggttgttgctgtgtggtcgtctggaatggagtcagtgggaatgggggggtctgccgtccggtaaggctgatgagggtgacgcggaggcgtcgtgctttctgatcctcaaactttatgatcatctggtgcgtaaaagtaaacgcaatatgccgactggttcgaacatgggcgagtccaaaccgtggaaagcaattaaagtagatctgctgcgttgcccccgcggcagttttgcgtttgcgatgttgcagtggaccggaagccgcatgttccgtcgtgatctgcgcgattacgcccgcgaagagaagaacatgatgctggacaatcattcgctgtatgacatgactcgtggtatccaactccctgctaaatcggaagaggaaattttcgaacatctggggcttgaatacctggaaccgttcgaacgtaacgca

SEQ ID NO: 4856 - protein, 529 aa, synthetic construct
  REGION 1..529: note = Variant of terminal deoxynucleotidyltransferase
MHHHHHHGGSGSHGIRTIDSDFGKKQQKKGDNHDSSATYEIKFHEFVLFILEEKMGATRRTFLTDLARKKGFRVENELTDEVTHIVAENLSRSEVLAWLKEHKMEKTKQFELLDISWLIESMKVGKPVDTKGKYQLAESVEVSANPDPTEGRVNELPPTMKTVSPYACQRRTTLNNRNQRFTDSLEILRENYVLKGNDDTALEFRRAISVLKSLPFEVRSLKDTEGLPWISDEVKGIMEEIIEVGESREVQAVLNDEWYQSFHAFTRVFGVGVKTADKWYRMGLRTLEDVRSSKTLKLTPWQKVGLTYYEDLARGVTRAEADAIWLLVQDAVATFDPDAIVEIVGGQRRGKPQGHDVDLLISSPGAEKEQEDQLLQKVMNLWKKQGLLLCGRLEWSQWEWGGLPSGKADEGDAEASCFLILKLYDHLVRKSKRNMPTGSNMGESKPWKAIKVDLLRCPRGSFAFAMLQWTGSRMFRRDLRDYAREEKNMMLDNHSLYDMTRGIQLPAKSEEEIFEHLGLEYLEPFERNA

SEQ ID NO: 4857 - DNA, 1587 bp, synthetic construct
  misc_feature 1..1587: note = Variant of terminal deoxynucleotidyltransferase
  source 1..1587: mol_type = other DNA
atgcaccatcatcatcatcatggcggtagcggcagccacggcattcgtaccatcgattcggacttcgggaagaaacagcagaaaaaaggcgataaccacgatagttccgccacttatgaaatcaaatttcacgagtttgtgctgttcattctcgaagaaaaaatgggtgcgacgcgtcgtacttttctgacagatttagcccgcaagaaagggttccgcgtcgagaatgaactgaccgacgaagttacccacatcgtggcagaaaatctgtcacgctctgaagtattggcttggctgaaagaacacaagatggagaagaccaagcaattcgaactgctggatattagctggcttatcgaaagcatgaaagttggtaaaccggtggacaccaaggggaaataccagttggcggaatcggttgaggtgagtgcgaacccagatccgacagaaggtcgtgtaaacgagctgcctcctactatgaaaaccgtttctccgtatgcgtgtcaacgccgcaccaccctgaacaaccgtaatcaacgttttacggactcgctggagattcttcgtgaaaattacgagctgaaaggcaacgacgatactgcgctggaatttcgtcgtgctatctccgtgctgaaaagccttccgtttgaggtacgtagcctgaaagacacggaaggattgccctggatcagtgatgaagtcaaagggattatggaagaaatcatcgaagtcggggagtcgcgtgaagtgcaggccgtgctcaatgatgagtggtatcaaagcttccacgcatttacgcgtgtctttggagtgggggtgaagacagcagacaagtggtaccgcatgggtctgcgcaccctcgaggatgttcgttccagcaagaccctgccactgacctcgtggcagaaagtaggtctgctgtattatgaagatcttgctcgcggcgttacgcgtgcggaagctgacgcgatttggctgctggtccaggatgcagtcgcaactttcgacccggatgcgatcgtggagattgtcggtggacagcgtcgtgggaaacctcagggtcacgacgttgatctgcttatcagttctccgggagctgaaaaagagcaagaagaccaactcctgcagaaagtgatgaatctgtggaagaaacaagggttgttgctgtgtggtcgtctggaatggagtcagtgggaatgggggggtctgccgtccggtaaggctgatgagggtgacgcggaggcgtcgtgctttctgatcctcaaactttatgatcatctggtgcgtaaaagtaaacgcaatatgccgactggttcgaacatgggcgagtccaaaccgtggaaagcaattaaagtagatctgctgcgttgcccccgcggcagttttgcgtttgcgatgttgcagtggaccggaagccgcatgttccgtcgtgatctgcgcgattacgcccgcgaagagaagaacatgatgctggacaatcattcgctgtatgacatgactcgtggtatccaactccctgctaaatcggaagaggaaattttcgaacatctggggcttgaatacctggaaccgttcgaacgtaacgca

SEQ ID NO: 4858 - protein, 529 aa, synthetic construct
  REGION 1..529: note = Variant of terminal deoxynucleotidyltransferase
MHHHHHHGGSGSHGIRTIDSDFGKKQQKKGDNHDSSATYEIKFHEFVLFILEEKMGATRRTFLTDLARKKGFRVENELTDEVTHIVAENLSRSEVLAWLKEHKMEKTKQFELLDISWLIESMKVGKPVDTKGKYQLAESVEVSANPDPTEGRVNELPPTMKTVSPYACQRRTTLNNRNQRFTDSLEILRENYELKGNDDTALEFRRAISVLKSLPFEVRSLKDTEGLPWISDEVKGIMEEIIEVGESREVQAVLNDEWYQSFHAFTRVFGVGVKTADKWYRMGLRTLEDVRSSKTLPLTSWQKVGLLYYEDLARGVTRAEADAIWLLVQDAVATFDPDAIVEIVGGQRRGKPQGHDVDLLISSPGAEKEQEDQLLQKVMNLWKKQGLLLCGRLEWSQWEWGGLPSGKADEGDAEASCFLILKLYDHLVRKSKRNMPTGSNMGESKPWKAIKVDLLRCPRGSFAFAMLQWTGSRMFRRDLRDYAREEKNMMLDNHSLYDMTRGIQLPAKSEEEIFEHLGLEYLEPFERNA

SEQ ID NO: 4859 - DNA, 1587 bp, synthetic construct
  misc_feature 1..1587: note = Variant of terminal deoxynucleotidyltransferase
  source 1..1587: mol_type = other DNA
atgcaccatcatcatcatcatggcggtagcggcagccacggcattcgtaccatcgattcggacttcgggaagaaacagcagaaaaaaggcgataaccacgatagttccgccacttatgaaatcaaatttcacgagtttgtgctgttcattctcgaagaaaaaatgggtgcgacgcgtcgtacttttctgacagatttagcccgcaagaaagggttccgcgtcgagaatgaactgaccgacgaagttacccacatcgtggcagaaaatctgtcacgctctgaagtattggcttggctgaaagaacacaagatggagaagaccaagcaattcgaactgctggatattagctggcttatcgaaagcatgaaagttggtaaaccggtggacaccaaggggaaataccagttggcggaatcggttgaggtgagtgcgaacccagatccgacagaaggtcgtgtaaacgagctgcctcctactatgaaaaccgtttctccgtatgcgtgtcaacgccgcaccaccctgaacaaccgtaatcaacgttttacggactcgctggagattcttcgtgaaaattacgagctgaaaggcaacgacgatactgcgctggaatttcgtcgtgctatctccgtgctgaaaagccttccgtttgaggtacgtagcctgaaagacacggaaggattgccctggatcagtgatgaagtcaaagggattatggaagaaatcatcgaagtcggggagtcgcgtgaagtgcaggccgtgctcaatgatgagtggtatcaaagcttccacgcatttacgcgtgtctttggagtgggggtgaagacagcagacaagtggtaccgcatgggtctgcgcaccctcgaggatgttcgttccagcaagaccctgccattcaccacgtggcagaaagtaggtctgctgtattatgaagatcttgctcgcggcgttacgcgtgcggaagctgacgcgatttggctgctggtccaggatgcagtcgcaactttcgacccggatgcgatcgtggagattgtcggtggacagcgtcgtgggaaacctcagggtcacgacgttgatctgctgatcagttctccgggagctgaaaaagagcaagaagaccaactcctgcagaaagtgatgaatctgtggaagaaacaagggttgttgctgtgtggtagcctggaatggagtcagtgggaatgggggggtctgccgtccggtaaggctgatgagggtgacgcggaggcgtcgtgctttctgatcctcaaactttatgatcatctggtgcgtaaaagtaaacgcaatatgccgactggttcgaacatgggcgagtccaaaccgtggaaagcaattaaagtagatctgctgcgttgcccccgcggcagttttgcgtttgcgatgttgcagtggaccggaagccgcatgttccgtcgtgatctgcgcgattacgcccgcgaagagaagaacatgatgctggataatcattcgctgtatgacatgactcgtggtatccaactccctgctaaatcggaagaggaaattttcgaacatctggggcttgaatacctggaaccgttcgaacgtaacgca

SEQ ID NO: 4860 - protein, 529 aa, synthetic construct
  REGION 1..529: note = Variant of terminal deoxynucleotidyltransferase
MHHHHHHGGSGSHGIRTIDSDFGKKQQKKGDNHDSSATYEIKFHEFVLFILEEKMGATRRTFLTDLARKKGFRVENELTDEVTHIVAENLSRSEVLAWLKEHKMEKTKQFELLDISWLIESMKVGKPVDTKGKYQLAESVEVSANPDPTEGRVNELPPTMKTVSPYACQRRTTLNNRNQRFTDSLEILRENYELKGNDDTALEFRRAISVLKSLPFEVRSLKDTEGLPWISDEVKGIMEEIIEVGESREVQAVLNDEWYQSFHAFTRVFGVGVKTADKWYRMGLRTLEDVRSSKTLPFTTWQKVGLLYYEDLARGVTRAEADAIWLLVQDAVATFDPDAIVEIVGGQRRGKPQGHDVDLLISSPGAEKEQEDQLLQKVMNLWKKQGLLLCGSLEWSQWEWGGLPSGKADEGDAEASCFLILKLYDHLVRKSKRNMPTGSNMGESKPWKAIKVDLLRCPRGSFAFAMLQWTGSRMFRRDLRDYAREEKNMMLDNHSLYDMTRGIQLPAKSEEEIFEHLGLEYLEPFERNA

SEQ ID NO: 4861 - DNA, 1587 bp, synthetic construct
  misc_feature 1..1587: note = Variant of terminal deoxynucleotidyltransferase
  source 1..1587: mol_type = other DNA
atgcaccatcatcatcatcatggcggtagcggcagccacggcattcgtaccatcgattcggacttcgggaagaaacagcagaaaaaaggcgataaccacgatagttccgccacttatgaaatcaaatttcacgagtttgtgctgttcattctcgaagaaaaaatgggtgcgacgcgtcgtacttttctgacagatttagcccgcaagaaagggttccgcgtcgagaatgaactgaccgacgaagttacccacatcgtggcagaaaatctgtcacgctctgaagtattggcttggctgaaagaacacaagatggagaagaccaagcaattcgaactgctggatattagctggcttatcgaaagcatgaaagttggtaaaccggtggacaccaaggggaaataccagttggcggaatcggttgaggtgagtgcgaacccagatccgacagaaggtcgtgtaaacgagctgcctcctactatgaaaaccgtttctccgtatgcgtgtcaacgccgcaccaccctgaacaaccgtaatcaacgttttacggactcgctggagattcttcgtgaaaattacgagctgaaaggcaacgacgatactgcgctggaatttcgtcgtgctatctccgtgctgaaaagccttccgtttgaggtacgtagcctgaaagacacggaaggattgccctggatcagtgatgaagtcaaagggattatggaagaaatcatcgaagtcggggagtcgcgtgaagtgcaggccgtgctcaatgatgagtggtatcaaagcttccacgcatttacgcgtgtctttggagtgggggtgaagacagcagacaagtggtaccgcatgggtctgcgcaccctcgaggatgttcgttccagcaagaccctgaagttcacctcgtggcagaaagtaggtctgctgtattatgaagatcttgctcgcggcgttacgcgtgcggaagctgacgcgatttggctgctggctcaggatgcagtcgcaactttcgacccggatgcgatcgtggagattgtcggtggacagcgtcgtgggaaacctcagggtcacgacgttgatctgcttatcagttctccgggagctgaaaaagagcaagaagaccaactcctgcagaaagtgatgaatctgtggaagaaacaagggttgttgctgtgtggtcgtctggaatggagtcagtgggaatgggggggtctgccgtccggtaaggctgatgagggtgacgcggaggcgtcgtgctttctgatcctcaaactttatgatcatctggtgcgtaaaagtaaacgcaatatgccgactggttcgaacatgggcgagtccaaaccgtggaaagcaattaaagtagatctgctgcgttgcccccgcggcagttttgcgtttgcgatgttgcagtggaccggaagccgcatgttccgtcgtgatctgcgcgattacgcccgcgaagagaagaacatgatgctggacaatcattcgctgtatgacatgactcgtggtatccaactccctgctaaatcggaagaggaaattttcgaacatctggggcttgaatacctggaaccgttcgaacgtaacgca

SEQ ID NO: 4862 - protein, 529 aa, synthetic construct
  REGION 1..529: note = Variant of terminal deoxynucleotidyltransferase
MHHHHHHGGSGSHGIRTIDSDFGKKQQKKGDNHDSSATYEIKFHEFVLFILEEKMGATRRTFLTDLARKKGFRVENELTDEVTHIVAENLSRSEVLAWLKEHKMEKTKQFELLDISWLIESMKVGKPVDTKGKYQLAESVEVSANPDPTEGRVNELPPTMKTVSPYACQRRTTLNNRNQRFTDSLEILRENYELKGNDDTALEFRRAISVLKSLPFEVRSLKDTEGLPWISDEVKGIMEEIIEVGESREVQAVLNDEWYQSFHAFTRVFGVGVKTADKWYRMGLRTLEDVRSSKTLKFTSWQKVGLLYYEDLARGVTRAEADAIWLLAQDAVATFDPDAIVEIVGGQRRGKPQGHDVDLLISSPGAEKEQEDQLLQKVMNLWKKQGLLLCGRLEWSQWEWGGLPSGKADEGDAEASCFLILKLYDHLVRKSKRNMPTGSNMGESKPWKAIKVDLLRCPRGSFAFAMLQWTGSRMFRRDLRDYAREEKNMMLDNHSLYDMTRGIQLPAKSEEEIFEHLGLEYLEPFERNA

SEQ ID NO: 4863 - DNA, 1587 bp, synthetic construct
  misc_feature 1..1587: note = Variant of terminal deoxynucleotidyltransferase
  source 1..1587: mol_type = other DNA
atgcaccatcatcatcatcatggcggtagcggcagccacggcattcgtaccatcgattcggacttcgggaagaaacagcagaaaaaaggcgataaccacgatagttccgccacttatgaaatcaaatttcacgagtttgtgctgttcattctcgaagaaaaaatgggtgcgacgcgtcgtacttttctgacagatttagcccgcaagaaagggttccgcgtcgagaatgaactgaccgacgaagttacccacatcgtggcagaaaatctgtcacgctctgaagtattggcttggctgaaagaacacaagatggagaagaccaagcaattcgaactgctggatattagctggcttatcgaaagcatgaaagttggtaaaccggtggacaccaaggggaaataccagttggcggaatcggttgaggtgagtgcgaacccagatccgacagaaggtcgtgtaaacgagctgcctcctactatgaaaaccgtttctccgtatgcgtgtcaacgccgcaccaccctgaacaaccgtaatcaacgttttacggactcgctggagattcttcgtgaaaattacgagctgaaaggcaacgacgatactgcgctggaatttcgtcgtgctatctccgtgctgaaaagccttccgtttgaggtacgtagcctgaaagacacggaaggattgccctggatcagtgatgaagtcaaagggattatggaagaaatcatcgaagtcggggagtcgcgtgaagtgcaggccgtgctcaatgatgagtggtatcaaagcttccacgcatttacgcgtgtctttggagtgggggtgaagacagcagacaagtggtaccgcatgggtctgcgcaccctcgaggatgttcgttccagcaagaccctgccactgaccgaatggcagaaagtaggtctgctgtattatgaagatcttgctcgcggcgttacgcgtgcggaagctgacgcgatttggctgctggctcaggatgcagtcgcaactttcgacccggatgcgatcgtggagattgtcggtggacagcgtcgtgggaaacctcagggtcacgacgttgatctgcttatcagttctccgggagctgaaaaagagcaagaagaccaactcctgcagaaagtgatgaatctgtggaagaaacaagggttgttgctgtgtggtcgcctggaatggagtcagtgggaatgggggggtctgccgtccggtaaggctgatgagggtgacgcggaggcgtcgtgctttctgatcctcaaactttatgatcatctggtgcgtaaaagtaaacgcaatatgccgactggttcgaacatgggcgagtccaaaccgtggaaagcaattaaagtagatctgctgcgttgcccccgcggcagttttgcgtttgcgatgttgcagtggaccggaagccgcatgttccgtcgtgatctgcgcgattacgcccgcgaagagaagaacatgatgctggataatcattcgctgtatgacatgactcgtggtatccaactccctgctaaatcggaagaggaaattttcgaacatctggggcttgaatacctggaaccgttcgaacgtaacgca

SEQ ID NO: 4864 - protein, 529 aa, synthetic construct
  REGION 1..529: note = Variant of terminal deoxynucleotidyltransferase
MHHHHHHGGSGSHGIRTIDSDFGKKQQKKGDNHDSSATYEIKFHEFVLFILEEKMGATRRTFLTDLARKKGFRVENELTDEVTHIVAENLSRSEVLAWLKEHKMEKTKQFELLDISWLIESMKVGKPVDTKGKYQLAESVEVSANPDPTEGRVNELPPTMKTVSPYACQRRTTLNNRNQRFTDSLEILRENYELKGNDDTALEFRRAISVLKSLPFEVRSLKDTEGLPWISDEVKGIMEEIIEVGESREVQAVLNDEWYQSFHAFTRVFGVGVKTADKWYRMGLRTLEDVRSSKTLPLTEWQKVGLLYYEDLARGVTRAEADAIWLLAQDAVATFDPDAIVEIVGGQRRGKPQGHDVDLLISSPGAEKEQEDQLLQKVMNLWKKQGLLLCGRLEWSQWEWGGLPSGKADEGDAEASCFLILKLYDHLVRKSKRNMPTGSNMGESKPWKAIKVDLLRCPRGSFAFAMLQWTGSRMFRRDLRDYAREEKNMMLDNHSLYDMTRGIQLPAKSEEEIFEHLGLEYLEPFERNA

SEQ ID NO: 4865 - DNA, 1587 bp, synthetic construct
  misc_feature 1..1587: note = Variant of terminal deoxynucleotidyltransferase
  source 1..1587: mol_type = other DNA
atgcaccatcatcatcatcatggcggtagcggcagccacggcattcgtaccatcgattcggacttcgggaagaaacagcagaaaaaaggcgataaccacgatagttccgccacttatgaaatcaaatttcacgagtttgtgctgttcattctcgaagaaaaaatgggtgcgacgcgtcgtacttttctgacagatttagcccgcaagaaagggttccgcgtcgagaatgaactgaccgacgaagttacccacatcgtggcagaaaatctgtcacgctctgaagtattggcttggctgaaagaacacaagatggagaagaccaagcaattcgaactgctggatattagctggcttatcgaaagcatgaaagttggtaaaccggtggacaccaaggggaaataccagttggcggaatcggttgaggtgagtgcgaacccagatccgacagaaggtcgtgtaaacgagctgcctcctactatgaaaaccgtttctccgtatgcgtgtcaacgccgcaccaccctgaacaaccgtaatcaacgttttacggactcgctggagattcttcgtgaaaattacgagctgaaaggcaacgacgatactgcgctggaatttcgtcgtgctatctccgtgctgaaaagccttccgtttgaggtacgtagcctgaaagacacggaaggattgccctggatcagtgatgaagtcaaagggattatggaagaaatcatcgaagtcggggagtcgcgtgaagtgcaggccgtgctcaatgatgagtggtatcaaagcttccacgcatttacgcgtgtctttggagtgggggtgaagacagcagacaagtggtaccgcatgggtctgcgcaccctcgaggatgttcgttccagcaagaccctgaagttcaccgaatggcagaaagtaggtctgctgtattatgaagatcttgcccgcggcgttacgcgtgcggaagctgacgcgatttggctgctggtccaggatgcagtcgcaactttcgacccggatgcgatcgtggagattgtcggtggacagcgtcgtgggaaacctcagggtcacgacgttgatctgcttatcagttctccgggagctgaaaaagagcaagaagaccaactcctgcagaaagtgatgaatctgtggaagaaacaagggttgttgctgtgtggtagcctggaactgagtcagtgggaatgggggggtctgccgtccggtaaggctgatgagggtgacgcggaggcgtcgtgctttctgatcctcaaactttatgatcatctggtgcgtaaaagtaaacgcaatatgccgactggttcgaacatgggcgagtccaaaccgtggaaagcaattaaagtagatctgctgcgttgcccccgcggcagttttgcgtttgcgatgttgcagtggaccggaagccgcatgttccgtcgtgatctgcgcgattacgcccgcgaagagaagaacatgatgctggataatcattcgctgtatgacatgactcgtggtatccaactccctgctaaatcggaagaggaaattttcgaacatctggggcttgaatacctggaaccgttcgaacgtaacgca

SEQ ID NO: 4866 - protein, 529 aa, synthetic construct
  REGION 1..529: note = Variant of terminal deoxynucleotidyltransferase
MHHHHHHGGSGSHGIRTIDSDFGKKQQKKGDNHDSSATYEIKFHEFVLFILEEKMGATRRTFLTDLARKKGFRVENELTDEVTHIVAENLSRSEVLAWLKEHKMEKTKQFELLDISWLIESMKVGKPVDTKGKYQLAESVEVSANPDPTEGRVNELPPTMKTVSPYACQRRTTLNNRNQRFTDSLEILRENYELKGNDDTALEFRRAISVLKSLPFEVRSLKDTEGLPWISDEVKGIMEEIIEVGESREVQAVLNDEWYQSFHAFTRVFGVGVKTADKWYRMGLRTLEDVRSSKTLKFTEWQKVGLLYYEDLARGVTRAEADAIWLLVQDAVATFDPDAIVEIVGGQRRGKPQGHDVDLLISSPGAEKEQEDQLLQKVMNLWKKQGLLLCGSLELSQWEWGGLPSGKADEGDAEASCFLILKLYDHLVRKSKRNMPTGSNMGESKPWKAIKVDLLRCPRGSFAFAMLQWTGSRMFRRDLRDYAREEKNMMLDNHSLYDMTRGIQLPAKSEEEIFEHLGLEYLEPFERNA

SEQ ID NO: 4867 - DNA, 1587 bp, synthetic construct
  misc_feature 1..1587: note = Variant of terminal deoxynucleotidyltransferase
  source 1..1587: mol_type = other DNA
atgcaccatcatcatcatcatggcggtagcggcagccacggcattcgtaccatcgattcggacttcgggaagaaacagcagaaaaaaggcgataaccacgatagttccgccacttatgaaatcaaatttcacgagtttgtgctgttcattctcgaagaaaaaatgggtgcgacgcgtcgtacttttctgacagatttagcccgcaagaaagggttccgcgtcgagaatgaactgaccgacgaagttacccacatcgtggcagaaaatctgtcacgctctgaagtattggcttggctgaaagaacacaagatggagaagaccaagcaattcgaactgctggatattagctggcttatcgaaagcatgaaagttggtaaaccggtggacaccaaggggaaataccagttggcggaatcggttgaggtgagtgcgaacccagatccgacagaaggtcgtgtaaacgagctgcctcctactatgaaaaccgtttctccgtatgcgtgtcaacgccgcaccaccctgaacaaccgtaatcaacgttttacggactcgctggagattcttcgtgaaaattacgagctgaaaggcaacgacgatactgcgctggaatttcgtcgtgctatctccgtgctgaaaagccttccgtttgaggtacgtagcctgaaagacacggaaggattgccctggatcagtgatgaagtcaaagggattatggaagaaatcatcgaagtcggggagtcgcgtgaagtgcaggccgtgctcaatgatgagtggtatcaaagcttccacgcatttacgcgtgtctttggagtgggggtgaagacagcagacaagtggtaccgcatgggtctgcgcaccctcgaggatgttcgttccagcaagaccctgaagctgaccgaatggcagaaagtaggtctgctgtattatgaagatcttgcccgcggcgttacgcgtgcggaagctgacgcgatttggctgctggtccaggatgcagtcgcaactttcgacccggatgcgatcgtggagattgtcggtggacagcgtcgtgggaaacctcagggtcacgacgttgatctgctgatcagttctccgggagctgaaaaagagcaagaagaccaactcctgcagaaagtgatgaatctgtggaagaaacaagggttgttgctgtgtggtagcctggaactgagtcagtgggaatgggggggtctgccgtccggtaaggctgatgagggtgacgcggaggcgtcgtgctttctgatcctcaaactttatgatcatctggtgcgtaaaagtaaacgcaatatgccgactggttcgaacatgggcgagtccaaaccgtggaaagcaattaaagtagatctgctgcgttgcccccgcggcagttttgcgtttgcgatgttgcagtggaccggaagccgcatgttccgtcgtgatctgcgcgattacgcccgcgaagagaagaacatgatgctggacaatcattcgctgtatgacatgactcgtggtatccaactccctgctaaatcggaagaggaaattttcgaacatctggggcttgaatacctggaaccgttcgaacgtaacgca

SEQ ID NO: 4868 - protein, 529 aa, synthetic construct
  REGION 1..529: note = Variant of terminal deoxynucleotidyltransferase
MHHHHHHGGSGSHGIRTIDSDFGKKQQKKGDNHDSSATYEIKFHEFVLFILEEKMGATRRTFLTDLARKKGFRVENELTDEVTHIVAENLSRSEVLAWLKEHKMEKTKQFELLDISWLIESMKVGKPVDTKGKYQLAESVEVSANPDPTEGRVNELPPTMKTVSPYACQRRTTLNNRNQRFTDSLEILRENYELKGNDDTALEFRRAISVLKSLPFEVRSLKDTEGLPWISDEVKGIMEEIIEVGESREVQAVLNDEWYQSFHAFTRVFGVGVKTADKWYRMGLRTLEDVRSSKTLKLTEWQKVGLLYYEDLARGVTRAEADAIWLLVQDAVATFDPDAIVEIVGGQRRGKPQGHDVDLLISSPGAEKEQEDQLLQKVMNLWKKQGLLLCGSLELSQWEWGGLPSGKADEGDAEASCFLILKLYDHLVRKSKRNMPTGSNMGESKPWKAIKVDLLRCPRGSFAFAMLQWTGSRMFRRDLRDYAREEKNMMLDNHSLYDMTRGIQLPAKSEEEIFEHLGLEYLEPFERNA

SEQ ID NO: 4869 - DNA, 1587 bp, synthetic construct
  misc_feature 1..1587: note = Variant of terminal deoxynucleotidyltransferase
  source 1..1587: mol_type = other DNA
atgcaccatcatcatcatcatggcggtagcggcagccacggcattcgtaccatcgattcggacttcgggaagaaacagcagaaaaaaggcgataaccacgatagttccgccacttatgaaatcaaatttcacgagtttgtgctgttcattctcgaagaaaaaatgggtgcgacgcgtcgtacttttctgacagatttagcccgcaagaaagggttccgcgtcgagaatgaactgaccgacgaagttacccacatcgtggcagaaaatctgtcacgctctgaagtattggcttggctgaaagaacacaagatggagaagaccaagcaattcgaactgctggatattagctggcttatcgaaagcatgaaagttggtaaaccggtggacaccaaggggaaataccagttggcggaatcggttgaggtgagtgcgaacccagatccgacagaaggtcgtgtaaacgagctgcctcctactatgaaaaccgtttctccgtatgcgtgtcaacgccgcaccaccctgaacaaccgtaatcaacgttttacggactcgctggagattcttcgtgaaaattacgagctgaaaggcaacgacgatactgcgctggaatttcgtcgtgctatctccgtgctgaaaagccttccgtttgaggtacgtagcctgaaagacacggaaggattgccctggatcagtgatgaagtcaaagggattatggaagaaatcatcgaagtcggggagtcgcgtgaagtgcaggccgtgctcaatgatgagtggtatcaaagcttccacgcatttacgcgtgtctttggagtgggggtgaagacagcagacaagtggtaccgcatgggtctgcgcaccctcgaggatgttcgttccagcaagaccctgaagttgaccccgtggcagaaagtaggtctgctgtattatgaagatcttgctcgcggcgttacgcgtccagaagctgatgcgatttggctgctggttcaggatgcagtcgcaactttcgacccggatgcgatcgtggagattgtcggtggacagcgtcgtgggaaacctcagggtcacgacgttgatctgcttatcagttctccgggagctgaaaaagagcaagaagaccaactcctgcagaaagtgatgaatctgtggaagaaacaagggttgttgctgtgtggtcgtctggaatggagtcagtgggaatgggggggtctgccgtccggtaaggctgatgagggtgacgcggaggcgtcgtgctttctgatcctcaaactttatgatcatctggtgcgtaaaagtaaacgcaatatgccgactggttcgaacatgggcgagtccaaaccgtggaaagcaattaaagtagatctgctgcgttgcccccgcggcagttttgcgtttgcgatgttgcagtggaccggaagccgcatgttccgtcgtgatctgcgcgattacgcccgcgaagagaagaacatgatgctggacaatcattcgctgtatgacatgactcgtggtatccaactccctgctaaatcggaagaggaaattttcgaacatctggggcttgaatacctggaaccgttcgaacgtaacgca

SEQ ID NO: 4870 - protein, 529 aa, synthetic construct
  REGION 1..529: note = Variant of terminal deoxynucleotidyltransferase
MHHHHHHGGSGSHGIRTIDSDFGKKQQKKGDNHDSSATYEIKFHEFVLFILEEKMGATRRTFLTDLARKKGFRVENELTDEVTHIVAENLSRSEVLAWLKEHKMEKTKQFELLDISWLIESMKVGKPVDTKGKYQLAESVEVSANPDPTEGRVNELPPTMKTVSPYACQRRTTLNNRNQRFTDSLEILRENYELKGNDDTALEFRRAISVLKSLPFEVRSLKDTEGLPWISDEVKGIMEEIIEVGESREVQAVLNDEWYQSFHAFTRVFGVGVKTADKWYRMGLRTLEDVRSSKTLKLTPWQKVGLLYYEDLARGVTRPEADAIWLLVQDAVATFDPDAIVEIVGGQRRGKPQGHDVDLLISSPGAEKEQEDQLLQKVMNLWKKQGLLLCGRLEWSQWEWGGLPSGKADEGDAEASCFLILKLYDHLVRKSKRNMPTGSNMGESKPWKAIKVDLLRCPRGSFAFAMLQWTGSRMFRRDLRDYAREEKNMMLDNHSLYDMTRGIQLPAKSEEEIFEHLGLEYLEPFERNA

SEQ ID NO: 4871 - DNA, 1587 bp, synthetic construct
  misc_feature 1..1587: note = Variant of terminal deoxynucleotidyltransferase
  source 1..1587: mol_type = other DNA
atgcaccatcatcatcatcatggcggtagcggcagccacggcattcgtaccatcgattcggacttcgggaagaaacagcagaaaaaaggcgataaccacgatagttccgccacttatgaaatcaaatttcacgagtttgtgctgttcattctcgaagaaaaaatgggtgcgacgcgtcgtacttttctgacagatttagcccgcaagaaagggttccgcgtcgagaatgaactgaccgacgaagttacccacatcgtggcagaaaatctgtcacgctctgaagtattggcttggctgaaagaacacaagatggagaagaccaagcaattcgaactgctggatattagctggcttatcgaaagcatgaaagttggtaaaccggtggacaccaaggggaaataccagttggcggaatcggttgaggtgagtgcgaacccagatccgacagaaggtcgtgtaaacgagctgcctcctactatgaaaaccgtttctccgtatgcgtgtcaacgccgcaccaccctgaacaaccgtaatcaacgttttacggactcgctggagattcttcgtgaaaattacgagctgaaaggcaacgacgatactgcgctggaatttcgtcgtgctatctccgtgctgaaaagccttccgtttgaggtacgtagcctgaaagacacggaaggattgccctggatcagtgatgaagtcaaagggattatggaagaaatcatcgaagtcggggagtcgcgtgaagtgcaggccgtgctcaatgatgagtggtatcaaagcttccacgcatttacgcgtgtctttggagtgggggtgaagacagcagacaagtggtaccgcatgggtctgcgcaccctcgaggatgttcgttccagcaagaccctgaagttcacctcgtggcagaaagtaggtctgctgtattatgaagatcttgcccgcggcgttacgcgtgcggaagctgacgcgatttggctgctggtccaggatgcagtcgcaactttcgacccggatgcgatcgtggagattgtcggtggacagcgtcgtgggaaacctcagggtcacgacgttgatctgcttatcagttctccgggagctgaaaaagagcaagaagaccaactcctgcagaaagtgatgaatctgtggaagaaacaagggttgttgctgtgtggtagcctggaactgagtcagtgggaatgggggggtctgccgtccggtaaggctgatgagggtgacgcggaggcgtcgtgctttctgatcctcaaactttatgatcatctggtgcgtaaaagtaaacgcaatatgccgactggttcgaacatgggcgagtccaaaccgtggaaagcaattaaagtagatctgctgcgttgcccccgcggcagttttgcgtttgcgatgttgcagtggaccggaagccgcatgttccgtcgtgatctgcgcgattacgcccgcgaagagaagaacatgatgctggaaaatcattcgctgtatgacatgactcgtggtatccaactccctgctaaatcggaagaggaaattttcgaacatctggggcttgaatacctggaaccgttcgaacgtaacgca

SEQ ID NO: 4872 - protein, 529 aa, synthetic construct
  REGION 1..529: note = Variant of terminal deoxynucleotidyltransferase
MHHHHHHGGSGSHGIRTIDSDFGKKQQKKGDNHDSSATYEIKFHEFVLFILEEKMGATRRTFLTDLARKKGFRVENELTDEVTHIVAENLSRSEVLAWLKEHKMEKTKQFELLDISWLIESMKVGKPVDTKGKYQLAESVEVSANPDPTEGRVNELPPTMKTVSPYACQRRTTLNNRNQRFTDSLEILRENYELKGNDDTALEFRRAISVLKSLPFEVRSLKDTEGLPWISDEVKGIMEEIIEVGESREVQAVLNDEWYQSFHAFTRVFGVGVKTADKWYRMGLRTLEDVRSSKTLKFTSWQKVGLLYYEDLARGVTRAEADAIWLLVQDAVATFDPDAIVEIVGGQRRGKPQGHDVDLLISSPGAEKEQEDQLLQKVMNLWKKQGLLLCGSLELSQWEWGGLPSGKADEGDAEASCFLILKLYDHLVRKSKRNMPTGSNMGESKPWKAIKVDLLRCPRGSFAFAMLQWTGSRMFRRDLRDYAREEKNMMLENHSLYDMTRGIQLPAKSEEEIFEHLGLEYLEPFERNA

SEQ ID NO: 4873 - DNA, 1587 bp, synthetic construct
  misc_feature 1..1587: note = Variant of terminal deoxynucleotidyltransferase
  source 1..1587: mol_type = other DNA
atgcaccatcatcatcatcatggcggtagcggcagccacggcattcgtaccatcgattcggacttcgggaagaaacagcagaaaaaaggcgataaccacgatagttccgccacttatgaaatcaaatttcacgagtttgtgctgttcattctcgaagaaaaaatgggtgcgacgcgtcgtacttttctgacagatttagcccgcaagaaagggttccgcgtcgagaatgaactgaccgacgaagttacccacatcgtggcagaaaatctgtcacgctctgaagtattggcttggctgaaagaacacaagatggagaagaccaagcaattcgaactgctggatattagctggcttatcgaaagcatgaaagttggtaaaccggtggacaccaaggggaaataccagttggcggaatcggttgaggtgagtgcgaacccagatccgacagaaggtcgtgtaaacgagctgcctcctactatgaaaaccgtttctccgtatgcgtgtcaacgccgcaccaccctgaacaaccgtaatcaacgttttacggactcgctggagattcttcgccgcaattacgagctgaaaggcaacgacgatactgcgctggaatttcgtcgtgctatctccgtgctgaaaagccttccgtttgaggtacgtagcctgaaagacacggaaggattgccctggatcagtgatgaagtcaaagggattatggaagaaatcatcgaagtcggggagtcgcgtgaagtgcaggccgtgctcaatgatgagtggtatcaaagcttccacgcatttacgcgtgtctttggagtgggggtgaagacagcagacaagtggtaccgcatgggtctgcgcaccctcgaggatgttcgttccagcaagaccctgaagttgaccccgtggcagaaagtaggtctgctgtattatgaagatcttgctcgcggcgttacgcgtgcagaagctaatgcgatttggctgctggttcaggatgcagtcgcaactttcgacccggatgcgatcgtggagattgtcggtggacagcgtcgtgggaaacctcagggtcacgacgttgatctgcttatcagttctccgggagctgaaaaagagcaagaagaccaactcctgcagaaagtgatgaatctgtggaagaaacaagggttgttgctgtgtggtcgtctggaatggagtcagtgggaatgggggggtctgccgtccggtaaggctgatgagggtgacgcggaggcgtcgtgctttctgatcctcaaactttatgatcatctggtgcgtaaaagtaaacgcaatatgccgactggttcgaacatgggcgagtccaaaccgtggaaagcaattaaagtagatctgctgcgttgcccccgcggcagttttgcgtttgcgatgttgcagtggaccggaagccgcatgttccgtcgtgatctgcgcgattacgcccgcgaagagaagaacatgatgctggacaatcattcgctgtatgacatgactcgtggtatccaactccctgctaaatcggaagaggaaattttcgaacatctggggcttgaatacctggaaccgttcgaacgtaacgca

SEQ ID NO: 4874 - protein, 529 aa, synthetic construct
  REGION 1..529: note = Variant of terminal deoxynucleotidyltransferase
MHHHHHHGGSGSHGIRTIDSDFGKKQQKKGDNHDSSATYEIKFHEFVLFILEEKMGATRRTFLTDLARKKGFRVENELTDEVTHIVAENLSRSEVLAWLKEHKMEKTKQFELLDISWLIESMKVGKPVDTKGKYQLAESVEVSANPDPTEGRVNELPPTMKTVSPYACQRRTTLNNRNQRFTDSLEILRRNYELKGNDDTALEFRRAISVLKSLPFEVRSLKDTEGLPWISDEVKGIMEEIIEVGESREVQAVLNDEWYQSFHAFTRVFGVGVKTADKWYRMGLRTLEDVRSSKTLKLTPWQKVGLLYYEDLARGVTRAEANAIWLLVQDAVATFDPDAIVEIVGGQRRGKPQGHDVDLLISSPGAEKEQEDQLLQKVMNLWKKQGLLLCGRLEWSQWEWGGLPSGKADEGDAEASCFLILKLYDHLVRKSKRNMPTGSNMGESKPWKAIKVDLLRCPRGSFAFAMLQWTGSRMFRRDLRDYAREEKNMMLDNHSLYDMTRGIQLPAKSEEEIFEHLGLEYLEPFERNA

SEQ ID NO: 4875 - DNA, 1587 bp, synthetic construct
  misc_feature 1..1587: note = Variant of terminal deoxynucleotidyltransferase
  source 1..1587: mol_type = other DNA
atgcaccatcatcatcatcatggcggtagcggcagccacggcattcgtaccatcgattcggacttcgggaagaaacagcagaaaaaaggcgataaccacgatagttccgccacttatgaaatcaaatttcacgagtttgtgctgttcattctcgaagaaaaaatgggtgcgacgcgtcgtacttttctgacagatttagcccgcaagaaagggttccgcgtcgagaatgaactgaccgacgaagttacccacatcgtggcagaaaatctgtcacgctctgaagtattggcttggctgaaagaacacaagatggagaagaccaagcaattcgaactgctggatattagctggcttatcgaaagcatgaaagttggtaaaccggtggacaccaaggggaaataccagttggcggaatcggttgaggtgagtgcgaacccagatccgacagaaggtcgtgtaaacgagctgcctcctactatgaaaaccgtttctccgtatgcgtgtcaacgccgcaccaccctgaacaaccgtaatcaacgttttacggactcgctggagattcttcgtgaaaattacgagctgaaaggcaacgacgatactgcgctggaatttcgtcgtgctatctccgtgctgaaaagccttccgtttgaggtacgtagcctgaaagacacggaaggattgccctggatcagtgatgaagtcaaagggattatggaagaaatcatcgaagtcggggagtcgcgtgaagtgcaggccgtgctcaatgatgagtggtatcaaagcttccacgcatttacgcgtgtctttggagtgggggtgaagacagcagacaagtggtaccgcatgggtctgcgcaccctcgaggatgttcgttccagcaagaccctgaagttcaccgaatggcagaaagtaggtctgctgtattatgaagatcttgcccgcggcgttacgcgtgcggaagctgacgcgatttggctgctggtccaggatgcagtcgcaactttcgacccggatgcgatcgtggagattgtcggtggacagcgtcgtgggaaacctcagggtcacgacgttgatctgcttatcagttctccgggagctgaaaaagagcaagaagaccaactcctgcagaaagtgatgaatctgtggaagaaacaagggttgttgctgtgtggtcgcctggaatggagtcagtgggaatgggggggtctgccgtccggtaaggctgatgagggtgacgcggaggcgtcgtgctttctgatcctcaaactttatgatcatctggtgcgtaaaagtaaacgcaatatgccgactggttcgaacatgggcgagtccaaaccgtggaaagcaattaaagtagatctgctgcgttgcccccgcggcagttttgcgtttgcgatgttgcagtggaccggaagccgcatgttccgtcgtgatctgcgctggtacgcccgcgaagagaagaacatgatgctggacaatcattcgctgtatgacatgactcgtggtatccaactccctgctaaatcggaagaggaaattttcgaacatctggggcttgaatacctggaaccgttcgaacgtaacgca

SEQ ID NO: 4876 - protein, 529 aa, synthetic construct
  REGION 1..529: note = Variant of terminal deoxynucleotidyltransferase
MHHHHHHGGSGSHGIRTIDSDFGKKQQKKGDNHDSSATYEIKFHEFVLFILEEKMGATRRTFLTDLARKKGFRVENELTDEVTHIVAENLSRSEVLAWLKEHKMEKTKQFELLDISWLIESMKVGKPVDTKGKYQLAESVEVSANPDPTEGRVNELPPTMKTVSPYACQRRTTLNNRNQRFTDSLEILRENYELKGNDDTALEFRRAISVLKSLPFEVRSLKDTEGLPWISDEVKGIMEEIIEVGESREVQAVLNDEWYQSFHAFTRVFGVGVKTADKWYRMGLRTLEDVRSSKTLKFTEWQKVGLLYYEDLARGVTRAEADAIWLLVQDAVATFDPDAIVEIVGGQRRGKPQGHDVDLLISSPGAEKEQEDQLLQKVMNLWKKQGLLLCGRLEWSQWEWGGLPSGKADEGDAEASCFLILKLYDHLVRKSKRNMPTGSNMGESKPWKAIKVDLLRCPRGSFAFAMLQWTGSRMFRRDLRWYAREEKNMMLDNHSLYDMTRGIQLPAKSEEEIFEHLGLEYLEPFERNA

SEQ ID NO: 4877 - DNA, 1587 bp, synthetic construct
  misc_feature 1..1587: note = Variant of terminal deoxynucleotidyltransferase
  source 1..1587: mol_type = other DNA
atgcaccatcatcatcatcatggcggtagcggcagccacggcattcgtaccatcgattcggacttcgggaagaaacagcagaaaaaaggcgataaccacgatagttccgccacttatgaaatcaaatttcacgagtttgtgctgttcattctcgaagaaaaaatgggtgcgacgcgtcgtacttttctgacagatttagcccgcaagaaagggttccgcgtcgagaatgaactgaccgacgaagttacccacatcgtggcagaaaatctgtcacgctctgaagtattggcttggctgaaagaacacaagatggagaagaccaagcaattcgaactgctggatattagctggcttatcgaaagcatgaaagttggtaaaccggtggacaccaaggggaaataccagttggcggaatcggttgaggtgagtgcgaacccagatccgacagaaggtcgtgtaaacgagctgcctcctactatgaaaaccgtttctccgtatgcgtgtcaacgccgcaccaccctgaacaaccgtaatcaacgttttacggactcgctggagattcttcgtgaaaattacgagctgaaaggcaacgacgatactgcgctggaatttcgtcgtgctatctccgtgctgaaaagccttccgtttgaggtacgtagcctgaaagacacggaaggattgccctggatcagtgatgaagtcaaagggattatggaagaaatcatcgaagtcggggagtcgcgtgaagtgcaggccgtgctcaatgatgagtggtatcaaagcttccacgcatttacgcgtgtctttggagtgggggtgaagacagcagacaagtggtaccgcatgggtctgcgcaccctcgaggatgttcgttccagcaagaccctgaagttgaccccgtggcagaaagtaggtctgctgtattatgaagatcttgctcgcggcgttacgcgtgcggaagctgacgcgatttggctgctggttcaggatgcagtcgcaactttcgacccggatgcgatcgtggagattgtcggtggacagcgtcgtgggaaacctcagggtcacgacgttgatctgcttatcagttctccgggagctgaaaaagagcaagaagaccaactcctgcagaaagtgatgaatctgtggaagaaacaagggttgttgctgtgtggtcgtctggaatggagtcagtgggaatgggggggtctgccgtccggtaaggctgatgagggtgacgcggaggcgtcgtgctttctgatcctcaaactttatgatcatctggtgcgtaaaagtaaacgcaatatgccgactggttcgaacatgggcgagtccaaaccgtggaaagcaattaaagtagatctgctgcgttgcccccgcggcagttttgcgtttgcgatgttgcagtggaccggaagccgcatgttccgtcgtgatctgcgcgattacgcccgcgaagagaagaacatgatgctggaaaatcattcgctgtatgacatgactcgtggtatccaactccctgctaaatcggaagaggaaattttcgaacatctggggcttgaatacctggaaccgttcgaacgtaacgca

SEQ ID NO: 4878 - protein, 529 aa, synthetic construct
  REGION 1..529: note = Variant of terminal deoxynucleotidyltransferase
MHHHHHHGGSGSHGIRTIDSDFGKKQQKKGDNHDSSATYEIKFHEFVLFILEEKMGATRRTFLTDLARKKGFRVENELTDEVTHIVAENLSRSEVLAWLKEHKMEKTKQFELLDISWLIESMKVGKPVDTKGKYQLAESVEVSANPDPTEGRVNELPPTMKTVSPYACQRRTTLNNRNQRFTDSLEILRENYELKGNDDTALEFRRAISVLKSLPFEVRSLKDTEGLPWISDEVKGIMEEIIEVGESREVQAVLNDEWYQSFHAFTRVFGVGVKTADKWYRMGLRTLEDVRSSKTLKLTPWQKVGLLYYEDLARGVTRAEADAIWLLVQDAVATFDPDAIVEIVGGQRRGKPQGHDVDLLISSPGAEKEQEDQLLQKVMNLWKKQGLLLCGRLEWSQWEWGGLPSGKADEGDAEASCFLILKLYDHLVRKSKRNMPTGSNMGESKPWKAIKVDLLRCPRGSFAFAMLQWTGSRMFRRDLRDYAREEKNMMLENHSLYDMTRGIQLPAKSEEEIFEHLGLEYLEPFERNA

SEQ ID NO: 4879 - DNA, 1587 bp, synthetic construct
  misc_feature 1..1587: note = Variant of terminal deoxynucleotidyltransferase
  source 1..1587: mol_type = other DNA
atgcaccatcatcatcatcatggcggtagcggcagccacggcattcgtaccatcgattcggacttcgggaagaaacagcagaaaaaaggcgataaccacgatagttccgccacttatgaaatcaaatttcacgagtttgtgctgttcattctcgaagaaaaaatgggtgcgacgcgtcgtacttttctgacagatttagcccgcaagaaagggttccgcgtcgagaatgaactgaccgacgaagttacccacatcgtggcagaaaatctgtcacgctctgaagtattggcttggctgaaagaacacaagatggagaagaccaagcaattcgaactgctggatattagctggcttatcgaaagcatgaaagttggtaaaccggtggacaccaaggggaaataccagttggcggaatcggttgaggtgagtgcgaacccagatccgacagaaggtcgtgtaaacgagctgcctcctactatgaaaaccgtttctccgtatgcgtgtcaacgccgcaccaccctgaacaaccgtaatcaacgttttacggactcgctggagattcttcgcgaaaattacgagctgaaaggcaacgacgatactgcgctggaatttcgtcgtgctatctccgtgctgaaaagccttccgtttgaggtacgtagcctgaaagacacggaaggattgccctggatcagtgatgaagtcaaagggattatggaagaaatcatcgaagtcggggagtcgcgtgaagtgcaggccgtgctcaatgatgagtggtatcaaagcttccacgcatttacgcgtgtctttggagtgggggtgaagacagcagacaagtggtaccgcatgggtctgcgcaccctcgaggatgttcgttccagcaagaccctgaagttgaccccgtggcagaaagtaggtctgctgtattatgaagatcttgctcgcggcgttacgcgtgcagaagctaatgcgatttggctgctggttcaggatgcagtcgcaactttcgacccggatgcgatcgtggagattgtcggtggacagcgtcgtgggaaacctcagggtcacgacgttgatctgcttatcagttctccgggagctgaaaaagagcaagaagaccaactcctgcagaaagtgatgaatctgtggaagaaacaagggttgttgctgtgtggtcgtctggaatggagtcagtgggaatgggggggtctgccgtccggtaaggctgatgagggtgacgcggaggcgtcgtgctttctgatcctcaaactttatgatcatctggtgcgtaaaagtaaacgcaatatgccgactggttcgaacatgggcgagtccaaaccgtggaaagcaattaaagtagatctgctgcgttgcccccgcggcagttttgcgtttgcgatgttgcagtggaccggaagccgcatgttccgtcgtgatctgcgcgattacgcccgcgaagagaagaacatgatgctggacaatcattcgctgtatgacatgactcgtggtatccaactccctgctaaatcggaagaggaaattttcgaacatctggggcttgaatacctggaaccgttcgaacgtaacgca

SEQ ID NO: 4880 - protein, 529 aa, synthetic construct
  REGION 1..529: note = Variant of terminal deoxynucleotidyltransferase
MHHHHHHGGSGSHGIRTIDSDFGKKQQKKGDNHDSSATYEIKFHEFVLFILEEKMGATRRTFLTDLARKKGFRVENELTDEVTHIVAENLSRSEVLAWLKEHKMEKTKQFELLDISWLIESMKVGKPVDTKGKYQLAESVEVSANPDPTEGRVNELPPTMKTVSPYACQRRTTLNNRNQRFTDSLEILRENYELKGNDDTALEFRRAISVLKSLPFEVRSLKDTEGLPWISDEVKGIMEEIIEVGESREVQAVLNDEWYQSFHAFTRVFGVGVKTADKWYRMGLRTLEDVRSSKTLKLTPWQKVGLLYYEDLARGVTRAEANAIWLLVQDAVATFDPDAIVEIVGGQRRGKPQGHDVDLLISSPGAEKEQEDQLLQKVMNLWKKQGLLLCGRLEWSQWEWGGLPSGKADEGDAEASCFLILKLYDHLVRKSKRNMPTGSNMGESKPWKAIKVDLLRCPRGSFAFAMLQWTGSRMFRRDLRDYAREEKNMMLDNHSLYDMTRGIQLPAKSEEEIFEHLGLEYLEPFERNA

SEQ ID NO: 4881 - DNA, 1587 bp, synthetic construct
  misc_feature 1..1587: note = Variant of terminal deoxynucleotidyltransferase
  source 1..1587: mol_type = other DNA
atgcaccatcatcatcatcatggcggtagcggcagccacggcattcgtaccatcgattcggacttcgggaagaaacagcagaaaaaaggcgataaccacgatagttccgccacttatgaaatcaaatttcacgagtttgtgctgttcattctcgaagaaaaaatgggtgcgacgcgtcgtacttttctgacagatttagcccgcaagaaagggttccgcgtcgagaatgaactgaccgacgaagttacccacatcgtggcagaaaatctgtcacgctctgaagtattggcttggctgaaagaacacaagatggagaagaccaagcaattcgaactgctggatattagctggcttatcgaaagcatgaaagttggtaaaccggtggacaccaaggggaaataccagttggcggaatcggttgaggtgagtgcgaacccagatccgacagaaggtcgtgtaaacgagctgcctcctactatgaaaaccgtttctccgtatgcgtgtcaacgccgcaccaccctgaacaaccgtaatcaacgttttacggactcgctggagattcttcgtgaaaattacgagctgaaaggcaacgacgatactgcgctggaatttcgtcgtgctatctccgtgctgaaaagccttccgtttgaggtacgtagcctgaaagacacggaaggattgccctggatcagtgatgaagtcaaagggattatggaagaaatcatcgaagtcggggagtcgcgtgaagtgcaggccgtgctcaatgatgagtggtatcaaagcttccacgcatttacgcgtgtctttggagtgggggtgaagacagcagacaagtggtaccgcatgggtctgcgcaccctcgaggatgttcgttccagcaagaccctgaagctgaccacgtggcagaaagtaggtctgctgtattatgaagatcttgcccgcggcgttacgcgtgcggaagctgacgcgatttggctgctggttcaggatgcagtcgcaactttcgacccggatgcgatcgtggagattgtcggtggacagcgtcgtgggaaacctcagggtcacgacgttgatctgctgatcagttctccgggagctgaaaaagagcaagaagaccaactcctgcagaaagtgatgaatctgtggaagaaacaagggttgttgctgtgtggtcgtctggaatggagtcagtgggaatgggggggtctgccgtccggtaaggctgatgagggtgacgcggaggcgtcgtgctttctgatcctcaaactttatgatcatctggtgcgtaaaagtaaacgcaatatgccgactggttcgaacatgggcgagtccaaaccgtggaaagcaattaaagtagatctgctgcgttgcccccgcggcagttttgcgtttgcgatgttgcagtggaccggaagccgcatgttccgtcgtgatctgcgcgattacgcccgcgaagagaagaacatgatgctggataatcattcgctgtatgacatgactcgtggtatccaactccctgctaaatcggaagaggaaattttcgaacatctggggcttgaatacctggaaccgttcgaacgtaacgca

SEQ ID NO: 4882 - protein, 529 aa, synthetic construct
  REGION 1..529: note = Variant of terminal deoxynucleotidyltransferase
MHHHHHHGGSGSHGIRTIDSDFGKKQQKKGDNHDSSATYEIKFHEFVLFILEEKMGATRRTFLTDLARKKGFRVENELTDEVTHIVAENLSRSEVLAWLKEHKMEKTKQFELLDISWLIESMKVGKPVDTKGKYQLAESVEVSANPDPTEGRVNELPPTMKTVSPYACQRRTTLNNRNQRFTDSLEILRENYELKGNDDTALEFRRAISVLKSLPFEVRSLKDTEGLPWISDEVKGIMEEIIEVGESREVQAVLNDEWYQSFHAFTRVFGVGVKTADKWYRMGLRTLEDVRSSKTLKLTTWQKVGLLYYEDLARGVTRAEADAIWLLVQDAVATFDPDAIVEIVGGQRRGKPQGHDVDLLISSPGAEKEQEDQLLQKVMNLWKKQGLLLCGRLEWSQWEWGGLPSGKADEGDAEASCFLILKLYDHLVRKSKRNMPTGSNMGESKPWKAIKVDLLRCPRGSFAFAMLQWTGSRMFRRDLRDYAREEKNMMLDNHSLYDMTRGIQLPAKSEEEIFEHLGLEYLEPFERNA

SEQ ID NO: 4883 - DNA, 1587 bp, synthetic construct
  misc_feature 1..1587: note = Variant of terminal deoxynucleotidyltransferase
  source 1..1587: mol_type = other DNA
atgcaccatcatcatcatcatggcggtagcggcagccacggcattcgtaccatcgattcggacttcgggaagaaacagcagaaaaaaggcgataaccacgatagttccgccacttatgaaatcaaatttcacgagtttgtgctgttcattctcgaagaaaaaatgggtgcgacgcgtcgtacttttctgacagatttagcccgcaagaaagggttccgcgtcgagaatgaactgaccgacgaagttacccacatcgtggcagaaaatctgtcacgctctgaagtattggcttggctgaaagaacacaagatggagaagaccaagcaattcgaactgctggatattagctggcttatcgaaagcatgaaagttggtaaaccggtggacaccaaggggaaataccagttggcggaatcggttgaggtgagtgcgaacccagatccgacagaaggtcgtgtaaacgagctgcctcctactatgaaaaccgtttctccgtatgcgtgtcaacgccgcaccaccctgaacaaccgtaatcaacgttttacggactcgctggagattcttcgtgaaaattacgagctgaaaggcaacgacgatactgcgctggaatttcgtcgtgctatctccgtgctgaaaagccttccgtttgaggtacgtagcctgaaagacacggaaggattgccctggatcagtgatgaagtcaaagggattatggaagaaatcatcgaagtcggggagtcgcgtgaagtgcaggccgtgctcaatgatgagtggtatcaaagcttccacgcatttacgcgtgtctttggagtgggggtgaagacagcagacaagtggtaccgcatgggtctgcgcaccctcgaggatgttcgttccagcaagaccctgaagttcaccacgtggcagaaagtaggtctgctgtattatgaagatcttgctcgcggcgttacgcgtgcggaagctgacgcgatttggctgctggtccaggatgcagtcgcaactttcgacccggatgcgatcgtggagattgtcggtggacagcgtcgtgggaaacctcagggtcacgacgttgatctggtgatcagttctccgggagctgaaaaagagcaagaagaccaactcctgcagaaagtgatgaatctgtggaagaaacaagggttgttgctgtgtggtcgcctggaatggagtcagtgggaatgggggggtctgccgtccggtaaggctgatgagggtgacgcggaggcgtcgtgctttctgatcctcaaactttatgatcatctggtgcgtaaaagtaaacgcaatatgccgactggttcgaacatgggcgagtccaaaccgtggaaagcaattaaagtagatctgctgcgttgcccccgcggcagttttgcgtttgcgatgttgcagtggaccggaagccgcatgttccgtcgtgatctgcgcgattacgcccgcgaagagaagaacatgatgctggacaatcattcgctgtatgacatgactcgtggtatccaactccctgctaaatcggaagaggaaattttcgaacatctggggcttgaatacctggaaccgttcgaacgtaacgca

SEQ ID NO: 4884 - protein, 529 aa, synthetic construct
  REGION 1..529: note = Variant of terminal deoxynucleotidyltransferase
MHHHHHHGGSGSHGIRTIDSDFGKKQQKKGDNHDSSATYEIKFHEFVLFILEEKMGATRRTFLTDLARKKGFRVENELTDEVTHIVAENLSRSEVLAWLKEHKMEKTKQFELLDISWLIESMKVGKPVDTKGKYQLAESVEVSANPDPTEGRVNELPPTMKTVSPYACQRRTTLNNRNQRFTDSLEILRENYELKGNDDTALEFRRAISVLKSLPFEVRSLKDTEGLPWISDEVKGIMEEIIEVGESREVQAVLNDEWYQSFHAFTRVFGVGVKTADKWYRMGLRTLEDVRSSKTLKFTTWQKVGLLYYEDLARGVTRAEADAIWLLVQDAVATFDPDAIVEIVGGQRRGKPQGHDVDLVISSPGAEKEQEDQLLQKVMNLWKKQGLLLCGRLEWSQWEWGGLPSGKADEGDAEASCFLILKLYDHLVRKSKRNMPTGSNMGESKPWKAIKVDLLRCPRGSFAFAMLQWTGSRMFRRDLRDYAREEKNMMLDNHSLYDMTRGIQLPAKSEEEIFEHLGLEYLEPFERNA

SEQ ID NO: 4885 - DNA, 1587 bp, synthetic construct
  misc_feature 1..1587: note = Variant of terminal deoxynucleotidyltransferase
  source 1..1587: mol_type = other DNA
atgcaccatcatcatcatcatggcggtagcggcagccacggcattcgtaccatcgattcggacttcgggaagaaacagcagaaaaaaggcgataaccacgatagttccgccacttatgaaatcaaatttcacgagtttgtgctgttcattctcgaagaaaaaatgggtgcgacgcgtcgtacttttctgacagatttagcccgcaagaaagggttccgcgtcgagaatgaactgaccgacgaagttacccacatcgtggcagaaaatctgtcacgctctgaagtattggcttggctgaaagaacacaagatggagaagaccaagcaattcgaactgctggatattagctggcttatcgaaagcatgaaagttggtaaaccggtggacaccaaggggaaataccagttggcggaatcggttgaggtgagtgcgaacccagatccgacagaaggtcgtgtaaacgagctgcctcctactatgaaaaccgtttctccgtatgcgtgtcaacgccgcaccaccctgaacaaccgtaatcaacgttttacggactcgctggagattcttcgtgaaaattacgagctgaaaggcaacgacgatactgcgctggaatttcgtcgtgctatctccgtgctgaaaagccttccgtttgaggtacgtagcctgaaagacacggaaggattgccctggatcagtgatgaagtcaaagggattatggaagaaatcatcgaagtcggggagtcgcgtgaagtgcaggccgtgctcaatgatgagtggtatcaaagcttccacgcatttacgcgtgtctttggagtgggggtgaagacagcagacaagtggtaccgcatgggtctgcgcaccctcgaggatgttcgttccagcaagaccctgaagctgaccgaatggcagaaagtaggtctgctgtattatgaagatcttgctcgcggcgttacgcgtgcggaagctgacgcgatttggctgctggtccaggatgcagtcgcaactttcgacccggatgcgatcgtggagattgtcggtggacagcgtcgtgggaaacctcagggtcacgacgttgatctgcttatcagttctccgggagctgaaaaagagcaagaagaccaactcctgcagaaagtgatgaatctgtggaagaaacaagggttgttgctgtgtggtcgtctggaatggagtcagtgggaatgggggggtctgccgtccggtaaggctgatgagggtgacgcggaggcgtcgtgctttctgatcctcaaactttatgatcatctggtgcgtaaaagtaaacgcaatatgccgactggttcgaacatgggcgagtccaaaccgtggaaagcaattaaagtagatctgctgcgttgcccccgcggcagttttgcgtttgcgatgttgcagtggaccggaagccgcatgttccgtcgtgatctgcgcgattacgcccgcgaagagaagaacatgatgctggataatcattcgctgtatgacatgactcgtggtatccaactccctgctaaatcggaagaggaaattttcgaacatctggggcttgaatacctggaaccgttcgaacgtaacgca

SEQ ID NO: 4886 - protein, 529 aa, synthetic construct
  REGION 1..529: note = Variant of terminal deoxynucleotidyltransferase
MHHHHHHGGSGSHGIRTIDSDFGKKQQKKGDNHDSSATYEIKFHEFVLFILEEKMGATRRTFLTDLARKKGFRVENELTDEVTHIVAENLSRSEVLAWLKEHKMEKTKQFELLDISWLIESMKVGKPVDTKGKYQLAESVEVSANPDPTEGRVNELPPTMKTVSPYACQRRTTLNNRNQRFTDSLEILRENYELKGNDDTALEFRRAISVLKSLPFEVRSLKDTEGLPWISDEVKGIMEEIIEVGESREVQAVLNDEWYQSFHAFTRVFGVGVKTADKWYRMGLRTLEDVRSSKTLKLTEWQKVGLLYYEDLARGVTRAEADAIWLLVQDAVATFDPDAIVEIVGGQRRGKPQGHDVDLLISSPGAEKEQEDQLLQKVMNLWKKQGLLLCGRLEWSQWEWGGLPSGKADEGDAEASCFLILKLYDHLVRKSKRNMPTGSNMGESKPWKAIKVDLLRCPRGSFAFAMLQWTGSRMFRRDLRDYAREEKNMMLDNHSLYDMTRGIQLPAKSEEEIFEHLGLEYLEPFERNA

SEQ ID NO: 4887 - DNA, 1587 bp, synthetic construct
  misc_feature 1..1587: note = Variant of terminal deoxynucleotidyltransferase
  source 1..1587: mol_type = other DNA
atgcaccatcatcatcatcatggcggtagcggcagccacggcattcgtaccatcgattcggacttcgggaagaaacagcagaaaaaaggcgataaccacgatagttccgccacttatgaaatcaaatttcacgagtttgtgctgttcattctcgaagaaaaaatgggtgcgacgcgtcgtacttttctgacagatttagcccgcaagaaagggttccgcgtcgagaatgaactgaccgacgaagttacccacatcgtggcagaaaatctgtcacgctctgaagtattggcttggctgaaagaacacaagatggagaagaccaagcaattcgaactgctggatattagctggcttatcgaaagcatgaaagttggtaaaccggtggacaccaaggggaaataccagttggcggaatcggttgaggtgagtgcgaacccagatccgacagaaggtcgtgtaaacgagctgcctcctactatgaaaaccgtttctccgtatgcgtgtcaacgccgcaccaccctgaacaaccgtaatcaacgttttacggactcgctggagattcttcgcgaaaattacgtgctgaaaggcaacgacgatactgcgctggaatttcgtcgtgctatctccgtgctgaaaagccttccgtttgaggtacgtagcctgaaagacacggaaggattgccctggatcagtgatgaagtcaaagggattatggaagaaatcatcgaagtcggggagtcgcgtgaagtgcaggccgtgctcaatgatgagtggtatcaatcgttccacgcatttacgcgtgtctttggagtgggggtgaagacagcagacaagtggtaccgcatgggtctgcgcaccctcgaggatgttcgttccagcaagaccctgaagttgaccccgtggcagaaagtaggtctgctgtattatgaagatcttgctcgcggcgttacgcgtgcggaagctgacgcgatttggctgctggttcaggatgcagtcgcaactttcgacccggatgcgatcgtggagattgtcggtggacagcgtcgtgggaaacctcagggtcacgacgttgatctgcttatcagttctccgggagctgaaaaagagcaagaagaccaactcctgcagaaagtgatgaatctgtggaagaaacaagggttgttgctgtgtggtcgtctggaatggagtcagtgggaatgggggggtctgccgtccggtaaggctgatgagggtgacgcggaggcgtcgtgctttctgatcctcaaactttatgatcatctggtgcgtaaaagtaaacgcaatatgccgactggttcgaacatgggcgagtccaaaccgtggaaagcaattaaagtagatctgctgcgttgcccccgcggcagttttgcgtttgcgatgttgcagtggaccggaagccgcatgttccgtcgtgatctgcgcgattacgcccgcgaagagaagaacatgatgctggacaatcattcgctgtatgacatgactcgtggtatccaactccctgctaaatcggaagaggaaattttcgaacatctggggcttgaatacctggaaccgttcgaacgtaacgca

SEQ ID NO: 4888 - protein, 529 aa, synthetic construct
  REGION 1..529: note = Variant of terminal deoxynucleotidyltransferase
MHHHHHHGGSGSHGIRTIDSDFGKKQQKKGDNHDSSATYEIKFHEFVLFILEEKMGATRRTFLTDLARKKGFRVENELTDEVTHIVAENLSRSEVLAWLKEHKMEKTKQFELLDISWLIESMKVGKPVDTKGKYQLAESVEVSANPDPTEGRVNELPPTMKTVSPYACQRRTTLNNRNQRFTDSLEILRENYVLKGNDDTALEFRRAISVLKSLPFEVRSLKDTEGLPWISDEVKGIMEEIIEVGESREVQAVLNDEWYQSFHAFTRVFGVGVKTADKWYRMGLRTLEDVRSSKTLKLTPWQKVGLLYYEDLARGVTRAEADAIWLLVQDAVATFDPDAIVEIVGGQRRGKPQGHDVDLLISSPGAEKEQEDQLLQKVMNLWKKQGLLLCGRLEWSQWEWGGLPSGKADEGDAEASCFLILKLYDHLVRKSKRNMPTGSNMGESKPWKAIKVDLLRCPRGSFAFAMLQWTGSRMFRRDLRDYAREEKNMMLDNHSLYDMTRGIQLPAKSEEEIFEHLGLEYLEPFERNA

SEQ ID NO: 4889 - DNA, 1587 bp, synthetic construct
  misc_feature 1..1587: note = Variant of terminal deoxynucleotidyltransferase
  source 1..1587: mol_type = other DNA
atgcaccatcatcatcatcatggcggtagcggcagccacggcattcgtaccatcgattcggacttcgggaagaaacagcagaaaaaaggcgataaccacgatagttccgccacttatgaaatcaaatttcacgagtttgtgctgttcattctcgaagaaaaaatgggtgcgacgcgtcgtacttttctgacagatttagcccgcaagaaagggttccgcgtcgagaatgaactgaccgacgaagttacccacatcgtggcagaaaatctgtcacgctctgaagtattggcttggctgaaagaacacaagatggagaagaccaagcaattcgaactgctggatattagctggcttatcgaaagcatgaaagttggtaaaccggtggacaccaaggggaaataccagttggcggaatcggttgaggtgagtgcgaacccagatccgacagaaggtcgtgtaaacgagctgcctcctactatgaaaaccgtttctccgtatgcgtgtcaacgccgcaccaccctgaacaaccgtaatcaacgttttacggactcgctggagattcttcgcgaaaattacgagctgaaaggcaacgacgatactgcgctggaatttcgtcgtgctatctccgtgctgaaaagccttccgtttgaggtacgtagcctgaaagacacggaaggattgccctggatcagtgatgaagtcaaagggattatggaagaaatcatcgaagtcggggagtcgcgtgaagtgcaggccgtgctcaatgatgagtggtatcaagcgttccacgcatttacgcgtgtctttggagtgggggtgaagacagcagacaagtggtaccgcatgggtctgcgcaccctcgaggatgttcgttccagcaagaccctgaagttgaccccgtggcagaaagtaggtctgctgtattatgaagatcttgctcgcggcgttacgcgtgcagaagctaatgcgatttggctgctggttcaggatgcagtcgcaactttcgacccggatgcgatcgtggagattgtcggtggacagcgtcgtgggaaacctcagggtcacgacgttgatctgcttatcagttctccgggagctgaaaaagagcaagaagaccaactcctgcagaaagtgatgaatctgtggaagaaacaagggttgttgctgtgtggtcgtctggaatggagtcagtgggaatgggggggtctgccgtccggtaaggctgatgagggtgacgcggaggcgagctgctttctgatcgtgaaactttatgatcatctggtgcgtaaaagtaaacgcaatatgccgactggttcgaacatgggcgagtccaaaccgtggaaagcaattaaagtagatctgctgcgttgcccccgcggcagttttgcgtttgcgatgttgcagtggaccggaagccgcatgttccgtcgtgatctgcgcgattacgcccgcgaagagaagaacatgatgctggacaatcattcgctgtatgacatgactcgtggtatccaactccctgctaaatcggaagaggaaattttcgaacatctggggcttgaatacctggaaccgttcgaacgtaacgca

SEQ ID NO: 4890 - protein, 529 aa, synthetic construct
  REGION 1..529: note = Variant of terminal deoxynucleotidyltransferase
MHHHHHHGGSGSHGIRTIDSDFGKKQQKKGDNHDSSATYEIKFHEFVLFILEEKMGATRRTFLTDLARKKGFRVENELTDEVTHIVAENLSRSEVLAWLKEHKMEKTKQFELLDISWLIESMKVGKPVDTKGKYQLAESVEVSANPDPTEGRVNELPPTMKTVSPYACQRRTTLNNRNQRFTDSLEILRENYELKGNDDTALEFRRAISVLKSLPFEVRSLKDTEGLPWISDEVKGIMEEIIEVGESREVQAVLNDEWYQAFHAFTRVFGVGVKTADKWYRMGLRTLEDVRSSKTLKLTPWQKVGLLYYEDLARGVTRAEANAIWLLVQDAVATFDPDAIVEIVGGQRRGKPQGHDVDLLISSPGAEKEQEDQLLQKVMNLWKKQGLLLCGRLEWSQWEWGGLPSGKADEGDAEASCFLIVKLYDHLVRKSKRNMPTGSNMGESKPWKAIKVDLLRCPRGSFAFAMLQWTGSRMFRRDLRDYAREEKNMMLDNHSLYDMTRGIQLPAKSEEEIFEHLGLEYLEPFERNA

SEQ ID NO: 4891 - DNA, 1587 bp, synthetic construct
  misc_feature 1..1587: note = Variant of terminal deoxynucleotidyltransferase
  source 1..1587: mol_type = other DNA
atgcaccatcatcatcatcatggcggtagcggcagccacggcattcgtaccatcgattcggacttcgggaagaaacagcagaaaaaaggcgataaccacgatagttccgccacttatgaaatcaaatttcacgagtttgtgctgttcattctcgaagaaaaaatgggtgcgacgcgtcgtacttttctgacagatttagcccgcaagaaagggttccgcgtcgagaatgaactgaccgacgaagttacccacatcgtggcagaaaatctgtcacgctctgaagtattggcttggctgaaagaacacaagatggagaagaccaagcaattcgaactgctggatattagctggcttatcgaaagcatgaaagttggtaaaccggtggacaccaaggggaaataccagttggcggaatcggttgaggtgagtgcgaacccagatccgacagaaggtcgtgtaaacgagctgcctcctactatgaaaaccgtttctccgtatgcgtgtcaacgccgcaccaccctgaacaaccgtaatcaacgttttacggactcgctggagattcttcgtgaaaattacgagctgaaaggcaacgacgatactgcgctggaatttcgtcgtgctatctccgtgctgaaaagccttccgtttgaggtacgtagcctgaaagacacggaaggattgccctggatcagtgatgaagtcaaagggattatggaagaaatcatcgaagtcggggagtcgcgtgaagtgcaggccgtgctcaatgatgagtggtatcaaagcttccacgcatttacgcgtgtctttggagtgggggtgaagacagcagacaagtggtaccgcatgggtctgcgcaccctcgaggatgttcgttccagcaagaccctgaagttcacctcgtggcagaaagtaggtctgctgtattatgaagatcttgctcgcggcgttacgcgtgcggaagctgacgcgatttggctgctggtccaggatgcagtcgcaactttcgacccggatgcgatcgtggagattgtcggtggacagcgtcgtgggaaacctcagggtcacgacgttgatctgcttatcagttctccgggagctgaaaaagagcaagaagaccaactcctgcagaaagtgatgaatctgtggaagaaacaagggttgttgctgtgtggtagcctggaactgagtcagtgggaatgggggggtctgccgtccggtaaggctgatgagggtgacgcggaggcgtcgtgctttctgatcctcaaactttatgatcatctggtgcgtaaaagtaaacgcaatatgccgactggttcgaacatgggcgagtccaaaccgtggaaagcaattaaagtagatctgctgcgttgcccccgcggcagttttgcgtttgcgatgttgcagtggaccggaagccgcatgttccgtcgtgatctgcgcgattacgcccgcgaagagaagaacatgatgctggacaatcattcgctgtatgacatgactcgtggtatccaactccctgctaaatcggaagaggaaattttcgaacatctggggcttgaatacctggaaccgttcgaacgtaacgca

SEQ ID NO: 4892 - protein, 529 aa, synthetic construct
  REGION 1..529: note = Variant of terminal deoxynucleotidyltransferase
MHHHHHHGGSGSHGIRTIDSDFGKKQQKKGDNHDSSATYEIKFHEFVLFILEEKMGATRRTFLTDLARKKGFRVENELTDEVTHIVAENLSRSEVLAWLKEHKMEKTKQFELLDISWLIESMKVGKPVDTKGKYQLAESVEVSANPDPTEGRVNELPPTMKTVSPYACQRRTTLNNRNQRFTDSLEILRENYELKGNDDTALEFRRAISVLKSLPFEVRSLKDTEGLPWISDEVKGIMEEIIEVGESREVQAVLNDEWYQSFHAFTRVFGVGVKTADKWYRMGLRTLEDVRSSKTLKFTSWQKVGLLYYEDLARGVTRAEADAIWLLVQDAVATFDPDAIVEIVGGQRRGKPQGHDVDLLISSPGAEKEQEDQLLQKVMNLWKKQGLLLCGSLELSQWEWGGLPSGKADEGDAEASCFLILKLYDHLVRKSKRNMPTGSNMGESKPWKAIKVDLLRCPRGSFAFAMLQWTGSRMFRRDLRDYAREEKNMMLDNHSLYDMTRGIQLPAKSEEEIFEHLGLEYLEPFERNA

SEQ ID NO: 4893 - DNA, 1587 bp, synthetic construct
  misc_feature 1..1587: note = Variant of terminal deoxynucleotidyltransferase
  source 1..1587: mol_type = other DNA
atgcaccatcatcatcatcatggcggtagcggcagccacggcattcgtaccatcgattcggacttcgggaagaaacagcagaaaaaaggcgataaccacgatagttccgccacttatgaaatcaaatttcacgagtttgtgctgttcattctcgaagaaaaaatgggtgcgacgcgtcgtacttttctgacagatttagcccgcaagaaagggttccgcgtcgagaatgaactgaccgacgaagttacccacatcgtggcagaaaatctgtcacgctctgaagtattggcttggctgaaagaacacaagatggagaagaccaagcaattcgaactgctggatattagctggcttatcgaaagcatgaaagttggtaaaccggtggacaccaaggggaaataccagttggcggaatcggttgaggtgagtgcgaacccagatccgacagaaggtcgtgtaaacgagctgcctcctactatgaaaaccgtttctccgtatgcgtgtcaacgccgcaccaccctgaacaaccgtaatcaacgttttacggactcgctggagattcttcgtgaaaattacgagctgaaaggcaacgacgatactgcgctggaatttcgtcgtgctatctccgtgctgaaaagccttccgtttgaggtacgtagcctgaaagacacggaaggattgccctggatcagtgatgaagtcaaagggattatggaagaaatcatcgaagtcggggagtcgcgtgaagtgcaggccgtgctcaatgatgagtggtatcaaagcttccacgcatttacgcgtgtctttggagtgggggtgaagacagcagacaagtggtaccgcatgggtctgcgcaccctcgaggatgttcgttccagcaagaccctgaagttgaccccgtggcagaaagtaggtctgctgtattatgaagatcttgctcgcggcgttacgcgtgcggaagctgacgcgatttggctgctggttcaggatgcagtcgcaactttcgacccggatgcgatcgtggagattgtcggtggacagcgtcgtgggaaacctcagggtcacgacgttgatctgcttatcagttctccgggagctgaaaaagagcaagaagaccaactcctgcagaaagtgatgaatctgtggaagaaacaagggttgttgctgtgtggtcgtctggaatggagtcagtgggaatgggggggtctgccgtccggtaaggctgatgagggtgacgcggaggcgagctgctttctgatcgtgaaactttatgatcatctggtgcgtaaaagtaaacgcaatatgccgactggttcgaacatgggcgagtccaaaccgtggaaagcaattaaagtagatctgctgcgttgcccccgcggcagttttgcgtttgcgatgttgcagtggaccggaagccgcatgttccgtcgtgatctgcgcgattacgcccgcgaagagaagaacatgatgctggacaatcattcgctgtatgacatgactcgtggtatccaactccctgctaaatcggaagaggaaattttcgaacatctggggcttgaatacctggaaccgttcgaacgtaacgca

SEQ ID NO: 4894 - protein, 529 aa, synthetic construct
  REGION 1..529: note = Variant of terminal deoxynucleotidyltransferase
MHHHHHHGGSGSHGIRTIDSDFGKKQQKKGDNHDSSATYEIKFHEFVLFILEEKMGATRRTFLTDLARKKGFRVENELTDEVTHIVAENLSRSEVLAWLKEHKMEKTKQFELLDISWLIESMKVGKPVDTKGKYQLAESVEVSANPDPTEGRVNELPPTMKTVSPYACQRRTTLNNRNQRFTDSLEILRENYELKGNDDTALEFRRAISVLKSLPFEVRSLKDTEGLPWISDEVKGIMEEIIEVGESREVQAVLNDEWYQSFHAFTRVFGVGVKTADKWYRMGLRTLEDVRSSKTLKLTPWQKVGLLYYEDLARGVTRAEADAIWLLVQDAVATFDPDAIVEIVGGQRRGKPQGHDVDLLISSPGAEKEQEDQLLQKVMNLWKKQGLLLCGRLEWSQWEWGGLPSGKADEGDAEASCFLIVKLYDHLVRKSKRNMPTGSNMGESKPWKAIKVDLLRCPRGSFAFAMLQWTGSRMFRRDLRDYAREEKNMMLDNHSLYDMTRGIQLPAKSEEEIFEHLGLEYLEPFERNA

SEQ ID NO: 4895 - DNA, 1587 bp, synthetic construct
  misc_feature 1..1587: note = Variant of terminal deoxynucleotidyltransferase
  source 1..1587: mol_type = other DNA
atgcaccatcatcatcatcatggcggtagcggcagccacggcattcgtaccatcgattcggacttcgggaagaaacagcagaaaaaaggcgataaccacgatagttccgccacttatgaaatcaaatttcacgagtttgtgctgttcattctcgaagaaaaaatgggtgcgacgcgtcgtacttttctgacagatttagcccgcaagaaagggttccgcgtcgagaatgaactgaccgacgaagttacccacatcgtggcagaaaatctgtcacgctctgaagtattggcttggctgaaagaacacaagatggagaagaccaagcaattcgaactgctggatattagctggcttatcgaaagcatgaaagttggtaaaccggtggacaccaaggggaaataccagttggcggaatcggttgaggtgagtgcgaacccagatccgacagaaggtcgtgtaaacgagctgcctcctactatgaaaaccgtttctccgtatgcgtgtcaacgccgcaccaccctgaacaaccgtaatcaacgttttacggactcgctggagattcttcgtgaaaattacgagctgaaaggcaacgacgatactgcgctggaatttcgtcgtgctatctccgtgctgaaaagccttccgtttgaggtacgtagcctgaaagacacggaaggattgccctggatcagtgatgaagtcaaagggattatggaagaaatcatcgaagtcggggagtcgcgtgaagtgcaggccgtgctcaatgatgagtggtatcaaagcttccacgcatttacgcgtgtctttggagtgggggtgaagacagcagacaagtggtaccgcatgggtctgcgcaccctcgaggatgttcgttccagcaagaccctgaagttgaccccgtggcagaaagtaggtctgctgtattatgaagatcttgctcgcggcgttacgcgtgcggaagctgacgcgatttggctgctggttcaggatgcagtcgcaactttcgacccggatgcgatcgtggagattgtcggtggacagcgtcgtgggaaacctcagggtcacgacgttgatctgcttatcagttctccgggagctgaaaaagagcaagaagaccaactcctgcagaaagtgatgaatctgtggaagaaacaagggttgttgctgtgtggtagcctggaatggagtcagtgggaatgggggggtctgccgtccggtaaggctgatgagggtgacgcggaggcgtcgtgctttctgatcctcaaactttatgatcatctggtgcgtaaaagtaaacgcaatatgccgactggttcgaacatgggcgagtccaaaccgtggaaagcaattaaagtagatctgctgcgttgcccccgcggcagttttgcgtttgcgatgttgcagtggaccggaagccgcatgttccgtcgtgatctgcgcgattacgcccgcgaagagaagaacatgatgctggacaatcattcgctgtatgacatgactcgtggtatccaactccctgctaaatcggaagaggaaattttcgaacatctggggcttgaatacctggaaccgttcgaacgtaacgca

SEQ ID NO: 4896 - protein, 529 aa, synthetic construct
  REGION 1..529: note = Variant of terminal deoxynucleotidyltransferase
MHHHHHHGGSGSHGIRTIDSDFGKKQQKKGDNHDSSATYEIKFHEFVLFILEEKMGATRRTFLTDLARKKGFRVENELTDEVTHIVAENLSRSEVLAWLKEHKMEKTKQFELLDISWLIESMKVGKPVDTKGKYQLAESVEVSANPDPTEGRVNELPPTMKTVSPYACQRRTTLNNRNQRFTDSLEILRENYELKGNDDTALEFRRAISVLKSLPFEVRSLKDTEGLPWISDEVKGIMEEIIEVGESREVQAVLNDEWYQSFHAFTRVFGVGVKTADKWYRMGLRTLEDVRSSKTLKLTPWQKVGLLYYEDLARGVTRAEADAIWLLVQDAVATFDPDAIVEIVGGQRRGKPQGHDVDLLISSPGAEKEQEDQLLQKVMNLWKKQGLLLCGSLEWSQWEWGGLPSGKADEGDAEASCFLILKLYDHLVRKSKRNMPTGSNMGESKPWKAIKVDLLRCPRGSFAFAMLQWTGSRMFRRDLRDYAREEKNMMLDNHSLYDMTRGIQLPAKSEEEIFEHLGLEYLEPFERNA

SEQ ID NO: 4897 - DNA, 1587 bp, synthetic construct
  misc_feature 1..1587: note = Variant of terminal deoxynucleotidyltransferase
  source 1..1587: mol_type = other DNA
atgcaccatcatcatcatcatggcggtagcggcagccacggcattcgtaccatcgattcggacttcgggaagaaacagcagaaaaaaggcgataaccacgatagttccgccacttatgaaatcaaatttcacgagtttgtgctgttcattctcgaagaaaaaatgggtgcgacgcgtcgtacttttctgacagatttagcccgcaagaaagggttccgcgtcgagaatgaactgaccgacgaagttacccacatcgtggcagaaaatctgtcacgctctgaagtattggcttggctgaaagaacacaagatggagaagaccaagcaattcgaactgctggatattagctggcttatcgaaagcatgaaagttggtaaaccggtggacaccaaggggaaataccagttggcggaatcggttgaggtgagtgcgaacccagatccgacagaaggtcgtgtaaacgagctgcctcctactatgaaaaccgtttctccgtatgcgtgtcaacgccgcaccaccctgaacaaccgtaatcaacgttttacggactcgctggagattcttaaggaaaattacgtgctgaaaggcaacgacgatactgcgctggaatttcgtcgtgttatctccgtgctgaaaagccttccgtttgaggtacgtagcctgaaagacacggaaggattgccctggatcagtgatgaagtcaaagggattatggaagaaatcatcgaagtcggggagtcgcgtgaagtgcaggccgtgctcaatgatgagtggtatcaatcgttccacgcatttacgcgtgtctttggagtgggggtgaagacagcagacaagtggtaccgcatgggtctgcgcaccctcgaggatgttcgttccagcaagaccctgaagttgaccccgtggcagaaagtaggtctgacgtattatgaagatcttgctcgcggcgttacgcgtgcggaagctgacgcgatttggctgctggttcaggatgcagtcgcaactttcgacccggatgcgatcgtggagattgtcggtggacagcgtcgtgggaaacctcgcggtcacgacgttgatctgcttatcagttctccgggagctgaaaaagagcaagaagaccaactcctgcagaaagtgatgaatctgtggaagaaacaagggttgttgctgtgtggtcgtctggaatggagtcagtgggaatgggggggtctgccgtccggtaaggctgatgagggtgacgcggaggcgtcgtgctttctgatcctcaaactttatgatcatctggtgcgtaaaagtaaacgcaatatgccgactggttcgaacatgggcgagtccaaaccgtggaaagcaattaaagtagatctgctgcgttgcccccgcggcagttttgcgtttgcgatgttgcagtggaccggaagccgcatgttccgtcgtgatctgcgcgattacgcccgcgaagagaagaacatgatgctggacaatcattcgctgtatgacatgactcgtggtatccaactccctgctaaatcggaagaggaaattttcgaacatctggggcttgaatacctggaaccgttcgaacgtaacgca

SEQ ID NO: 4898 - protein, 529 aa, synthetic construct
  REGION 1..529: note = Variant of terminal deoxynucleotidyltransferase
MHHHHHHGGSGSHGIRTIDSDFGKKQQKKGDNHDSSATYEIKFHEFVLFILEEKMGATRRTFLTDLARKKGFRVENELTDEVTHIVAENLSRSEVLAWLKEHKMEKTKQFELLDISWLIESMKVGKPVDTKGKYQLAESVEVSANPDPTEGRVNELPPTMKTVSPYACQRRTTLNNRNQRFTDSLEILKENYVLKGNDDTALEFRRVISVLKSLPFEVRSLKDTEGLPWISDEVKGIMEEIIEVGESREVQAVLNDEWYQSFHAFTRVFGVGVKTADKWYRMGLRTLEDVRSSKTLKLTPWQKVGLTYYEDLARGVTRAEADAIWLLVQDAVATFDPDAIVEIVGGQRRGKPRGHDVDLLISSPGAEKEQEDQLLQKVMNLWKKQGLLLCGRLEWSQWEWGGLPSGKADEGDAEASCFLILKLYDHLVRKSKRNMPTGSNMGESKPWKAIKVDLLRCPRGSFAFAMLQWTGSRMFRRDLRDYAREEKNMMLDNHSLYDMTRGIQLPAKSEEEIFEHLGLEYLEPFERNA

SEQ ID NO: 4899 - DNA, 1587 bp, synthetic construct
  misc_feature 1..1587: note = Variant of terminal deoxynucleotidyltransferase
  source 1..1587: mol_type = other DNA
atgcaccatcatcatcatcatggcggtagcggcagccacggcattcgtaccatcgattcggacttcgggaagaaacagcagaaaaaaggcgataaccacgatagttccgccacttatgaaatcaaatttcacgagtttgtgctgttcattctcgaagaaaaaatgggtgcgacgcgtcgtacttttctgacagatttagcccgcaagaaagggttccgcgtcgagaatgaactgaccgacgaagttacccacatcgtggcagaaaatctgtcacgctctgaagtattggcttggctgaaagaacacaagatggagaagaccaagcaattcgaactgctggatattagctggcttatcgaaagcatgaaagttggtaaaccggtggacaccaaggggaaataccagttggcggaatcggttgaggtgagtgcgaacccagatccgacagaaggtcgtgtaaacgagctgcctcctactatgaaaaccgtttctccgtatgcgtgtcaacgccgcaccaccctgaacaaccgtaatcaacgttttacggactcgctggagattcttaaggaaaattacgagctgaaaggcaacgacgatactgcgctggaatttcgtcgtgctatctccgtgctgaaaagccttccgtttgaggtacgtagcctgaaagacacggaaggattgccctggatcagtgatgaagtcaaagggattatggaagaaatcatcgaagtcggggagtcgcgtgaagtgcaggccgtgctcaatgatgagtggtatcaaagcttccacgcatttacgcgtgtctttggagtgggggtgaagacagcagacaagtggtaccgcatgggtctgcgcaccctcgaggatgttcgttccagcaagaccctgaagttgaccccgtggcagaaagtaggtctgctgtattatgaagatcttgctcgcggcgttacgcgtgcggaagctgacgcgatttggctgctggttcaggatgcagtcgcaactttcgacccggatgcgatcgtggagattgtcggtggacagcgtcgtgggaaacctcagggtcacgacgttgatctgcttatcagttctccgggagctgaaaaagagcaagaagaccaactcctgcagaaagtgatgaatctgtggaagaaacaagggttgttgctgtgtggtcgtctggaatggagtcagtgggaatgggggggtctgccgtccggtaaggctgatgagggtgacgcggaggcgtcgtgctttctgatcctcaaactttatgatcatctggtgcgtaaaagtaaacgcaatatgccgactggttcgaacatgggcgagtccaaaccgtggaaagcaattaaagtagatctgctgcgttgcccccgcggcagttttgcgtttgcgatgttgcagtggaccggaagccgcatgttccgtcgtgatctgcgcgattacgcccgcgaagagaagaacatgatgctggacaatcattcgctgtatgacatgactcgtggtatccaactccctgctaaatcggaagaggaaattttcgaacatctggggcttgaatacctggaaccgttcgaacgtaacgca

SEQ ID NO: 4900 - protein, 529 aa, synthetic construct
  REGION 1..529: note = Variant of terminal deoxynucleotidyltransferase
MHHHHHHGGSGSHGIRTIDSDFGKKQQKKGDNHDSSATYEIKFHEFVLFILEEKMGATRRTFLTDLARKKGFRVENELTDEVTHIVAENLSRSEVLAWLKEHKMEKTKQFELLDISWLIESMKVGKPVDTKGKYQLAESVEVSANPDPTEGRVNELPPTMKTVSPYACQRRTTLNNRNQRFTDSLEILKENYELKGNDDTALEFRRAISVLKSLPFEVRSLKDTEGLPWISDEVKGIMEEIIEVGESREVQAVLNDEWYQSFHAFTRVFGVGVKTADKWYRMGLRTLEDVRSSKTLKLTPWQKVGLLYYEDLARGVTRAEADAIWLLVQDAVATFDPDAIVEIVGGQRRGKPQGHDVDLLISSPGAEKEQEDQLLQKVMNLWKKQGLLLCGRLEWSQWEWGGLPSGKADEGDAEASCFLILKLYDHLVRKSKRNMPTGSNMGESKPWKAIKVDLLRCPRGSFAFAMLQWTGSRMFRRDLRDYAREEKNMMLDNHSLYDMTRGIQLPAKSEEEIFEHLGLEYLEPFERNA

SEQ ID NO: 4901 - DNA, 1587 bp, synthetic construct
  misc_feature 1..1587: note = Variant of terminal deoxynucleotidyltransferase
  source 1..1587: mol_type = other DNA
atgcaccatcatcatcatcatggcggtagcggcagccacggcattcgtaccatcgattcggacttcgggaagaaacagcagaaaaaaggcgataaccacgatagttccgccacttatgaaatcaaatttcacgagtttgtgctgttcattctcgaagaaaaaatgggtgcgacgcgtcgtacttttctgacagatttagcccgcaagaaagggttccgcgtcgagaatgaactgaccgacgaagttacccacatcgtggcagaaaatctgtcacgctctgaagtattggcttggctgaaagaacacaagatggagaagaccaagcaattcgaactgctggatattagctggcttatcgaaagcatgaaagttggtaaaccggtggacaccaaggggaaataccagttggcggaatcggttgaggtgagtgcgaacccagatccgacagaaggtcgtgtaaacgagctgcctcctactatgaaaaccgtttctccgtatgcgtgtcaacgccgcaccaccctgaacaaccgtaatcaacgttttacggactcgctggagattcttcgcgaaaattacgtgctgaaaggcaacgacgatactgcgctggaatttcgtcgtgctatctccgtgctgaaaagccttccgtttgaggtacgtagcctgaaagacacggaaggattgccctggatcagtgatgaagtcaaagggattatggaagaaatcatcgaagtcggggagtcgcgtgaagtgcaggccgtgctcaatgatgagtggtatcaaagcttccacgcatttacgcgtgtctttggagtgggggtgaagacagcagacaagtggtaccgcatgggtctgcgcaccctcgaggatgttcgttccagcaagaccctgaagttgaccccgtggcagaaagtaggtctgacgtattatgaagatcttgctcgcggcgttacgcgtgcggaagctgacgcgatttggctgctggttcaggatgcagtcgcaactttcgacccggatgcgatcgtggagattgtcggtggacagcgtcgtgggaaacctcagggtcacgacgttgatctgcttatcagttctccgggagctgaaaaagagcaagaagatcaactcctgcagaaagtgatgaatctgtggaagaaacaagggttgttgctgtgtggtcgtctggtgtggagtcagtgggaatgggggggtctgccgtccggtaaggctgatgagggtgacgcggaggcgtcgtgctttctgatcctcaaactttatgatcatctggtgcgtaaaagtaaacgcaatatgccgactggttcgaacatgggcgagtccaaaccgtggaaagcaattaaagtagatctgctgcgttgcccccgcggcagttttgcgtttgcgatgttgcagtggaccggaagccgcatgttccgtcgtgatctgcgcgattacgcccgcgaagagaagaacatgatgctggacaatcattcgctgtatgacatgactcgtggtatccaactccctgctaaatcggaagaggaaattttcgaacatctggggcttgaatacctggaaccgttcgaacgtaacgca

SEQ ID NO: 4902 - protein, 529 aa, synthetic construct
  REGION 1..529: note = Variant of terminal deoxynucleotidyltransferase
MHHHHHHGGSGSHGIRTIDSDFGKKQQKKGDNHDSSATYEIKFHEFVLFILEEKMGATRRTFLTDLARKKGFRVENELTDEVTHIVAENLSRSEVLAWLKEHKMEKTKQFELLDISWLIESMKVGKPVDTKGKYQLAESVEVSANPDPTEGRVNELPPTMKTVSPYACQRRTTLNNRNQRFTDSLEILRENYVLKGNDDTALEFRRAISVLKSLPFEVRSLKDTEGLPWISDEVKGIMEEIIEVGESREVQAVLNDEWYQSFHAFTRVFGVGVKTADKWYRMGLRTLEDVRSSKTLKLTPWQKVGLTYYEDLARGVTRAEADAIWLLVQDAVATFDPDAIVEIVGGQRRGKPQGHDVDLLISSPGAEKEQEDQLLQKVMNLWKKQGLLLCGRLVWSQWEWGGLPSGKADEGDAEASCFLILKLYDHLVRKSKRNMPTGSNMGESKPWKAIKVDLLRCPRGSFAFAMLQWTGSRMFRRDLRDYAREEKNMMLDNHSLYDMTRGIQLPAKSEEEIFEHLGLEYLEPFERNA

SEQ ID NO: 4903 - DNA, 1587 bp, synthetic construct
  misc_feature 1..1587: note = Variant of terminal deoxynucleotidyltransferase
  source 1..1587: mol_type = other DNA
atgcaccatcatcatcatcatggcggtagcggcagccacggcattcgtaccatcgattcggacttcgggaagaaacagcagaaaaaaggcgataaccacgatagttccgccacttatgaaatcaaatttcacgagtttgtgctgttcattctcgaagaaaaaatgggtgcgacgcgtcgtacttttctgacagatttagcccgcaagaaagggttccgcgtcgagaatgaactgaccgacgaagttacccacatcgtggcagaaaatctgtcacgctctgaagtattggcttggctgaaagaacacaagatggagaagaccaagcaattcgaactgctggatattagctggcttatcgaaagcatgaaagttggtaaaccggtggacaccaaggggaaataccagttggcggaatcggttgaggtgagtgcgaacccagatccgacagaaggtcgtgtaaacgagctgcctcctactatgaaaaccgtttctccgtatgcgtgtcaacgccgcaccaccctgaacaaccgtaatcaacgttttacggactcgctggagattcttcgcgaaaattacgtgctgaaaggcaacgacgatactgcgctggaatttcgtcgtgctatctccgtgctgaaaagccttccgtttgaggtacgtagcctgaaagacacggaaggattgccctggatcagtgatgaagtcaaagggattatggaagaaatcatcgaagtcggggagtcgcgtgaagtgcaggccgtgctcaatgatgagtggtatcaaagcttccacgcatttacgcgtgtctttggagtgggggtgaagacagcagacaagtggtaccgcatgggtctgcgcaccctcgaggatgttcgttccagcaagaccctgaagttgaccccgtggcagaaagtaggtctgacgtattatgaagatcttgctcgcggcgttacgcgtgcggaagctgacgcgatttggctgctggttcaggatgcagtcgcaactttcgacccggatgcgatcgtggagattgtcggtggacagcgtcgtgggaaacctcagtctcacgacgttgatctgcttatcagttctccgggagctgaaaaagagcaagaagaccaactcctgcagaaagtgatgaatctgtggaagaaacaagggttgttgctgtgtggtcgtctggaatggagtcagtgggaatgggggggtctgccgtccggtaaggctgatgagggtgacgcggaggcgtcgtgctttctgatcctcaaactttatgatcatctggtgcgtaaaagtaaacgcaatatgccgactggttcgaacatgggcgagtccaaaccgtggaaagcaattaaagtagatctgctgcgttgcccccgcggcagttttgcgtttgcgatgttgcagtggaccggaagccgcatgttccgtcgtgatctgcgcgattacgcccgcgaagagaagaacatgatgctggacaatcattcgctgtatgacatgactcgtggtatccaactccctgctaaatcggaagaggaaattttcgaacatctggggcttgaatacctggaaccgttcgaacgtaacgca

SEQ ID NO: 4904 - protein, 529 aa, synthetic construct
  REGION 1..529: note = Variant of terminal deoxynucleotidyltransferase
MHHHHHHGGSGSHGIRTIDSDFGKKQQKKGDNHDSSATYEIKFHEFVLFILEEKMGATRRTFLTDLARKKGFRVENELTDEVTHIVAENLSRSEVLAWLKEHKMEKTKQFELLDISWLIESMKVGKPVDTKGKYQLAESVEVSANPDPTEGRVNELPPTMKTVSPYACQRRTTLNNRNQRFTDSLEILRENYVLKGNDDTALEFRRAISVLKSLPFEVRSLKDTEGLPWISDEVKGIMEEIIEVGESREVQAVLNDEWYQSFHAFTRVFGVGVKTADKWYRMGLRTLEDVRSSKTLKLTPWQKVGLTYYEDLARGVTRAEADAIWLLVQDAVATFDPDAIVEIVGGQRRGKPQSHDVDLLISSPGAEKEQEDQLLQKVMNLWKKQGLLLCGRLEWSQWEWGGLPSGKADEGDAEASCFLILKLYDHLVRKSKRNMPTGSNMGESKPWKAIKVDLLRCPRGSFAFAMLQWTGSRMFRRDLRDYAREEKNMMLDNHSLYDMTRGIQLPAKSEEEIFEHLGLEYLEPFERNA

SEQ ID NO: 4905 - DNA, 1587 bp, synthetic construct
  misc_feature 1..1587: note = Variant of terminal deoxynucleotidyltransferase
  source 1..1587: mol_type = other DNA
atgcaccatcatcatcatcatggcggtagcggcagccacggcattcgtaccatcgattcggacttcgggaagaaacagcagaaaaaaggcgataaccacgatagttccgccacttatgaaatcaaatttcacgagtttgtgctgttcattctcgaagaaaaaatgggtgcgacgcgtcgtacttttctgacagatttagcccgcaagaaagggttccgcgtcgagaatgaactgaccgacgaagttacccacatcgtggcagaaaatctgtcacgctctgaagtattggcttggctgaaagaacacaagatggagaagaccaagcaattcgaactgctggatattagctggcttatcgaaagcatgaaagttggtaaaccggtggacaccaaggggaaataccagttggcggaatcggttgaggtgagtgcgaacccagatccgacagaaggtcgtgtaaacgagctgcctcctactatgaaaaccgtttctccgtatgcgtgtcaacgccgcaccaccctgaacaaccgtaatcaacgttttacggactcgctggagattcttcgcgaaaattacgtgctgaaaggcaacgacgatactgcgctggaatttcgtcgtgctatctccgtgctgaaaagccttccgtttgaggtacgtagcctgaaagacacggaaggattgccctggatcagtgatgaagtcaaagggattatggaagaaatcatcgaagtcggggagtcgcgtgaagtgcaggccgtgctcaatgatgagtggtatcaaagcttccacgcatttacgcgtgtctttggagtgggggtgaagacagcagacaagtggtaccgcatgggtctgcgcaccctcgaggatgttcgttccagcaagaccctgaagttgaccccgtggcagaaagtaggtctgacgtattatgaagatcttgctcgcggcgttacgcgtgcggaagctgacgcgatttggctgctggttcaggatgcagtcgcaactttcgacccggatgcgatcgtggagattgtcggtggacagcgtcgtgggaaacctcagggtcacgacgttgatctgcttatcagttctccgggagctgaaaaagagcaagaagaccaactcctgcagaaagtgatgaatctgtggaagaaacaagggttgttgctgtgtggtaagctggaatggagtcagtgggaatgggggggtctgccgtccggtaaggctgatgagggtgacgcggaggcgtcgtgctttctgatcctcaaactttatgatcatctggtgcgtaaaagtaaacgcaatatgccgactggttcgaacatgggcgagtccaaaccgtggaaagcaattaaagtagatctgctgcgttgcccccgcggcagttttgcgtttgcgatgttgcagtggaccggaagccgcatgttccgtcgtgatctgcgcgattacgcccgcgaagagaagaacatgatgctggacaatcattcgctgtatgacatgactcgtggtatccaactccctgctaaatcggaagaggaaattttcgaacatctggggcttgaatacctggaaccgttcgaacgtaacgca

SEQ ID NO: 4906 - protein, 529 aa, synthetic construct
  REGION 1..529: note = Variant of terminal deoxynucleotidyltransferase
MHHHHHHGGSGSHGIRTIDSDFGKKQQKKGDNHDSSATYEIKFHEFVLFILEEKMGATRRTFLTDLARKKGFRVENELTDEVTHIVAENLSRSEVLAWLKEHKMEKTKQFELLDISWLIESMKVGKPVDTKGKYQLAESVEVSANPDPTEGRVNELPPTMKTVSPYACQRRTTLNNRNQRFTDSLEILRENYVLKGNDDTALEFRRAISVLKSLPFEVRSLKDTEGLPWISDEVKGIMEEIIEVGESREVQAVLNDEWYQSFHAFTRVFGVGVKTADKWYRMGLRTLEDVRSSKTLKLTPWQKVGLTYYEDLARGVTRAEADAIWLLVQDAVATFDPDAIVEIVGGQRRGKPQGHDVDLLISSPGAEKEQEDQLLQKVMNLWKKQGLLLCGKLEWSQWEWGGLPSGKADEGDAEASCFLILKLYDHLVRKSKRNMPTGSNMGESKPWKAIKVDLLRCPRGSFAFAMLQWTGSRMFRRDLRDYAREEKNMMLDNHSLYDMTRGIQLPAKSEEEIFEHLGLEYLEPFERNA

SEQ ID NO: 4907 - DNA, 1587 bp, synthetic construct
  misc_feature 1..1587: note = Variant of terminal deoxynucleotidyltransferase
  source 1..1587: mol_type = other DNA
atgcaccatcatcatcatcatggcggtagcggcagccacggcattcgtaccatcgattcggacttcgggaagaaacagcagaaaaaaggcgataaccacgatagttccgccacttatgaaatcaaatttcacgagtttgtgctgttcattctcgaagaaaaaatgggtgcgacgcgtcgtacttttctgacagatttagcccgcaagaaagggttccgcgtcgagaatgaactgaccgacgaagttacccacatcgtggcagaaaatctgtcacgctctgaagtattggcttggctgaaagaacacaagatggagaagaccaagcaattcgaactgctggatattagctggcttatcgaaagcatgaaagttggtaaaccggtggacaccaaggggaaataccagttggcggaatcggttgaggtgagtgcgaacccagatccgacagaaggtcgtgtaaacgagctgcctcctactatgaaaaccgtttctccgtatgcgtgtcaacgccgcaccaccctgaacaaccgtaatcaacgttttacggactcgctggagattcttcgcgaaaattacgtgctgaaaggcaacgacgatactgcgctggaatttcgtcgtgctatctccgtgctgaaaagccttccgtttgaggtacgtagcctgaaagacacggaaggattgccctggatcagtgatgaagtcaaagggattatggaagaaatcatcgaagtcggggagtcgcgtgaagtgcaggccgtgctcaatgatgagtggtatcaaagcttccacgcatttacgcgtgtctttggagtgggggtgaagacagcagacaagtggtaccgcatgggtctgcgcaccctcgaggatgttcgttccagcaagaccctgaagttgaccccgtggcagaaagtaggtctgacgtattatgaagatcttgctcgcggcgttacgcgtgcggaagctgacgcgatttggctgctggttcaggatgcagtcgcaactttcgacccggatgcgatcgtggagattgtcggtggacagcgtcgtgggaaaccttctggtcacgacgttgatctgcttatcagttctccgggagctgaaaaagagcaagaagaccaactcctgcagaaagtgatgaatctgtggaagaaacaagggttgttgctgtgtggtcgtctggaatggagtcagtgggaatgggggggtctgccgtccggtaaggctgatgagggtgacgcggaggcgtcgtgctttctgatcctcaaactttatgatcatctggtgcgtaaaagtaaacgcaatatgccgactggttcgaacatgggcgagtccaaaccgtggaaagcaattaaagtagatctgctgcgttgcccccgcggcagttttgcgtttgcgatgttgcagtggaccggaagccgcatgttccgtcgtgatctgcgcgattacgcccgcgaagagaagaacatgatgctggacaatcattcgctgtatgacatgactcgtggtatccaactccctgctaaatcggaagaggaaattttcgaacatctggggcttgaatacctggaaccgttcgaacgtaacgca

SEQ ID NO: 4908 - protein, 529 aa, synthetic construct
  REGION 1..529: note = Variant of terminal deoxynucleotidyltransferase
MHHHHHHGGSGSHGIRTIDSDFGKKQQKKGDNHDSSATYEIKFHEFVLFILEEKMGATRRTFLTDLARKKGFRVENELTDEVTHIVAENLSRSEVLAWLKEHKMEKTKQFELLDISWLIESMKVGKPVDTKGKYQLAESVEVSANPDPTEGRVNELPPTMKTVSPYACQRRTTLNNRNQRFTDSLEILRENYVLKGNDDTALEFRRAISVLKSLPFEVRSLKDTEGLPWISDEVKGIMEEIIEVGESREVQAVLNDEWYQSFHAFTRVFGVGVKTADKWYRMGLRTLEDVRSSKTLKLTPWQKVGLTYYEDLARGVTRAEADAIWLLVQDAVATFDPDAIVEIVGGQRRGKPSGHDVDLLISSPGAEKEQEDQLLQKVMNLWKKQGLLLCGRLEWSQWEWGGLPSGKADEGDAEASCFLILKLYDHLVRKSKRNMPTGSNMGESKPWKAIKVDLLRCPRGSFAFAMLQWTGSRMFRRDLRDYAREEKNMMLDNHSLYDMTRGIQLPAKSEEEIFEHLGLEYLEPFERNA

SEQ ID NO: 4909 - DNA, 1587 bp, synthetic construct
  misc_feature 1..1587: note = Variant of terminal deoxynucleotidyltransferase
  source 1..1587: mol_type = other DNA
atgcaccatcatcatcatcatggcggtagcggcagccacggcattcgtaccatcgattcggacttcgggaagaaacagcagaaaaaaggcgataaccacgatagttccgccacttatgaaatcaaatttcacgagtttgtgctgttcattctcgaagaaaaaatgggtgcgacgcgtcgtacttttctgacagatttagcccgcaagaaagggttccgcgtcgagaatgaactgaccgacgaagttacccacatcgtggcagaaaatctgtcacgctctgaagtattggcttggctgaaagaacacaagatggagaagaccaagcaattcgaactgctggatattagctggcttatcgaaagcatgaaagttggtaaaccggtggacaccaaggggaaataccagttggcggaatcggttgaggtgagtgcgaacccagatccgacagaaggtcgtgtaaacgagctgcctcctactatgaaaaccgtttctccgtatgcgtgtcaacgccgcaccaccctgaacaaccgtaatcaacgttttacggactcgctggagattcttcgcgaaaattacgtgctgaaaggcaacgacgatactgcgctggaatttcgtcgtgctatctccgtgctgaaaagccttccgtttgaggtacgtagcctgaaagacacggaaggattgccctggatcagtgatgaagtcaaagggattatggaagaaatcatcgaagtcggggagtcgcgtgaagtgcaggccgtgctcaatgatgagtggtatcaaagcttccacgcatttacgcgtgtctttggagtgggggtgaagacagcagacaagtggtaccgcatgggtctgcgcaccctcgaggatgttcgttccagcaagaccctgaagttgaccccgtggcagaaagtaggtctgacgtattatgaagatcttgctcgcggcgttacgcgtgcggaagctgacgcgatttggctgctggttcaggatgcagtcgcaactttcgacccggatgcgatcgtggagattgtcggtggacagcgtcgtgggaaacctcagggtcacgacgttgatctgcttatcagttctccgggagctgaaaaagagcaagaagaccaactcctgcagaaagtgatgaatctgtggaagaaacaagggttgttgctgtgtggtcgtctggcttggagtcagtgggaatgggggggtctgccgtccggtaaggctgatgagggtgacgcggaggcgtcgtgctttctgatcctcaaactttatgatcatctggtgcgtaaaagtaaacgcaatatgccgactggttcgaacatgggcgagtccaaaccgtggaaagcaattaaagtagatctgctgcgttgcccccgcggcagttttgcgtttgcgatgttgcagtggaccggaagccgcatgttccgtcgtgatctgcgcgattacgcccgcgaagagaagaacatgatgctggacaatcattcgctgtatgacatgactcgtggtatccaactccctgctaaatcggaagaggaaattttcgaacatctggggcttgaatacctggaaccgttcgaacgtaacgca

SEQ ID NO: 4910 - protein, 529 aa, synthetic construct
  REGION 1..529: note = Variant of terminal deoxynucleotidyltransferase
MHHHHHHGGSGSHGIRTIDSDFGKKQQKKGDNHDSSATYEIKFHEFVLFILEEKMGATRRTFLTDLARKKGFRVENELTDEVTHIVAENLSRSEVLAWLKEHKMEKTKQFELLDISWLIESMKVGKPVDTKGKYQLAESVEVSANPDPTEGRVNELPPTMKTVSPYACQRRTTLNNRNQRFTDSLEILRENYVLKGNDDTALEFRRAISVLKSLPFEVRSLKDTEGLPWISDEVKGIMEEIIEVGESREVQAVLNDEWYQSFHAFTRVFGVGVKTADKWYRMGLRTLEDVRSSKTLKLTPWQKVGLTYYEDLARGVTRAEADAIWLLVQDAVATFDPDAIVEIVGGQRRGKPQGHDVDLLISSPGAEKEQEDQLLQKVMNLWKKQGLLLCGRLAWSQWEWGGLPSGKADEGDAEASCFLILKLYDHLVRKSKRNMPTGSNMGESKPWKAIKVDLLRCPRGSFAFAMLQWTGSRMFRRDLRDYAREEKNMMLDNHSLYDMTRGIQLPAKSEEEIFEHLGLEYLEPFERNA

SEQ ID NO: 4911 - DNA, 1587 bp, synthetic construct
  misc_feature 1..1587: note = Variant of terminal deoxynucleotidyltransferase
  source 1..1587: mol_type = other DNA
atgcaccatcatcatcatcatggcggtagcggcagccacggcattcgtaccatcgattcggacttcgggaagaaacagcagaaaaaaggcgataaccacgatagttccgccacttatgaaatcaaatttcacgagtttgtgctgttcattctcgaagaaaaaatgggtgcgacgcgtcgtacttttctgacagatttagcccgcaagaaagggttccgcgtcgagaatgaactgaccgacgaagttacccacatcgtggcagaaaatctgtcacgctctgaagtattggcttggctgaaagaacacaagatggagaagaccaagcaattcgaactgctggatattagctggcttatcgaaagcatgaaagttggtaaaccggtggacaccaaggggaaataccagttggcggaatcggttgaggtgagtgcgaacccagatccgacagaaggtcgtgtaaacgagctgcctcctactatgaaaaccgtttctccgtatgcgtgtcaacgccgcaccaccctgaacaaccgtaatcaacgttttacggactcgctggagattcttcgcgaaaattacgtgctgaaaggcaacgacgatactgcgctggaatttcgtcgtgctatctccgtgctgaaaagccttccgtttgaggtacgtagcctgaaagacacggaaggattgccctggatcagtgatgaagtcaaagggattatggaagaaatcatcgaagtcggggagtcgcgtgaagtgcaggccgtgctcaatgatgagtggtatcaaagcttccacgcatttacgcgtgtctttggagtgggggtgaagacagcagacaagtggtaccgcatgggtctgcgcaccctcgaggatgttcgttccagcaagaccctgaagttgaccccgtgggctaaagtaggtctgctgtattatgaagatcttgctcgcggcgttacgcgtgcggaagctgacgcgatttggctgctggttcaggatgcagtcgcaactttcgacccggatgcgatcgtggagattgtcggtggacagcgtcgtgggaaacctcagggtcacgacgttgatctgcttatcagttctccgggagctgaaaaagagcaagaagaccaactcctgcagaaagtgatgaatctgtggaagaaacaagggttgttgctgtgtggtcgtctggaatggagtcagtgggaatgggggggtctgccgtccggtaaggctgatgagggtgacgcggaggcgtcgtgctttctgatcctcaaactttatgatcatctggtgcgtaaaagtaaacgcaatatgccgactggttcgaacatgggcgagtccaaaccgtggaaagcaattaaagtagatctgctgcgttgcccccgcggcagttttgcgtttgcgatgttgcagtggaccggaagccgcatgttccgtcgtgatctgcgcgattacgcccgcgaagagaagaacatgatgctggacaatcattcgctgtatgacatgactcgtggtatccaactccctgctaaatcggaagaggaaattttcgaacatctggggcttgaatacctggaaccgttcgaacgtaacgca

SEQ ID NO: 4912 - protein, 529 aa, synthetic construct
  REGION 1..529: note = Variant of terminal deoxynucleotidyltransferase
MHHHHHHGGSGSHGIRTIDSDFGKKQQKKGDNHDSSATYEIKFHEFVLFILEEKMGATRRTFLTDLARKKGFRVENELTDEVTHIVAENLSRSEVLAWLKEHKMEKTKQFELLDISWLIESMKVGKPVDTKGKYQLAESVEVSANPDPTEGRVNELPPTMKTVSPYACQRRTTLNNRNQRFTDSLEILRENYVLKGNDDTALEFRRAISVLKSLPFEVRSLKDTEGLPWISDEVKGIMEEIIEVGESREVQAVLNDEWYQSFHAFTRVFGVGVKTADKWYRMGLRTLEDVRSSKTLKLTPWAKVGLLYYEDLARGVTRAEADAIWLLVQDAVATFDPDAIVEIVGGQRRGKPQGHDVDLLISSPGAEKEQEDQLLQKVMNLWKKQGLLLCGRLEWSQWEWGGLPSGKADEGDAEASCFLILKLYDHLVRKSKRNMPTGSNMGESKPWKAIKVDLLRCPRGSFAFAMLQWTGSRMFRRDLRDYAREEKNMMLDNHSLYDMTRGIQLPAKSEEEIFEHLGLEYLEPFERNA

SEQ ID NO: 4913 - DNA, 1587 bp, synthetic construct
  misc_feature 1..1587: note = Variant of terminal deoxynucleotidyltransferase
  source 1..1587: mol_type = other DNA
atgcaccatcatcatcatcatggcggtagcggcagccacggcattcgtaccatcgattcggacttcgggaagaaacagcagaaaaaaggcgataaccacgatagttccgccacttatgaaatcaaatttcacgagtttgtgctgttcattctcgaagaaaaaatgggtgcgacgcgtcgtacttttctgacagatttagcccgcaagaaagggttccgcgtcgagaatgaactgaccgacgaagttacccacatcgtggcagaaaatctgtcacgctctgaagtattggcttggctgaaagaacacaagatggagaagaccaagcaattcgaactgctggatattagctggcttatcgaaagcatgaaagttggtaaaccggtggacaccaaggggaaataccagttggcggaatcggttgaggtgagtgcgaacccagatccgacagaaggtcgtgtaaacgagctgcctcctactatgaaaaccgtttctccgtatgcgtgtcaacgccgcaccaccctgaacaaccgtaatcaacgttttacggactcgctggagattcttcgcgaaaattacgtgctgaaaggcaacgacgatactgcgctggaatttcgtcgtgctatctccgtgctgaaaagccttccgtttgaggtacgtagcctgaaagacacggaaggattgccctggatcagtgatgaagtcaaagggattatggaagaaatcatcgaagtcggggagtcgcgtgaagtgcaggccgtgctcaatgatgagtggtatcaaagcttccacgcatttacgcgtgtctttggagtgggggtgaagacagcagacaagtggtaccgcatgggtctgcgcaccctcgaggatgttcgttccagcaagaccctgaagttgaccccgtggcagaaagtaggtctgacgtattatgaagatcttgctcgcggcgttacgcgtgcggaagctgacgcgatttggctgctggttcaggatgcagtcgcaactttcgacccggatgcgatcgtggagattgtcggtggacagcgtcgtgggaaacctcggggtcacgacgttgatctgcttatcagttctccgggagctgaaaaagagcaagaagaccaactcctgcagaaagtgatgaatctgtggaagaaacaagggttgttgctgtgtggtcgtctggaatggagtcagtgggaatgggggggtctgccgtccggtaaggctgatgagggtgacgcggaggcgtcgtgctttctgatcctcaaactttatgatcatctggtgcgtaaaagtaaacgcaatatgccgactggttcgaacatgggcgagtccaaaccgtggaaagcaattaaagtagatctgctgcgttgcccccgcggcagttttgcgtttgcgatgttgcagtggaccggaagccgcatgttccgtcgtgatctgcgcgattacgcccgcgaagagaagaacatgatgctggacaatcattcgctgtatgacatgactcgtggtatccaactccctgctaaatcggaagaggaaattttcgaacatctggggcttgaatacctggaaccgttcgaacgtaacgca

SEQ ID NO: 4914 - protein, 529 aa, synthetic construct
  REGION 1..529: note = Variant of terminal deoxynucleotidyltransferase
MHHHHHHGGSGSHGIRTIDSDFGKKQQKKGDNHDSSATYEIKFHEFVLFILEEKMGATRRTFLTDLARKKGFRVENELTDEVTHIVAENLSRSEVLAWLKEHKMEKTKQFELLDISWLIESMKVGKPVDTKGKYQLAESVEVSANPDPTEGRVNELPPTMKTVSPYACQRRTTLNNRNQRFTDSLEILRENYVLKGNDDTALEFRRAISVLKSLPFEVRSLKDTEGLPWISDEVKGIMEEIIEVGESREVQAVLNDEWYQSFHAFTRVFGVGVKTADKWYRMGLRTLEDVRSSKTLKLTPWQKVGLTYYEDLARGVTRAEADAIWLLVQDAVATFDPDAIVEIVGGQRRGKPRGHDVDLLISSPGAEKEQEDQLLQKVMNLWKKQGLLLCGRLEWSQWEWGGLPSGKADEGDAEASCFLILKLYDHLVRKSKRNMPTGSNMGESKPWKAIKVDLLRCPRGSFAFAMLQWTGSRMFRRDLRDYAREEKNMMLDNHSLYDMTRGIQLPAKSEEEIFEHLGLEYLEPFERNA

SEQ ID NO: 4915 - DNA, 1587 bp, synthetic construct
  misc_feature 1..1587: note = Variant of terminal deoxynucleotidyltransferase
  source 1..1587: mol_type = other DNA
atgcaccatcatcatcatcatggcggtagcggcagccacggcattcgtaccatcgattcggacttcgggaagaaacagcagaaaaaaggcgataaccacgatagttccgccacttatgaaatcaaatttcacgagtttgtgctgttcattctcgaagaaaaaatgggtgcgacgcgtcgtacttttctgacagatttagcccgcaagaaagggttccgcgtcgagaatgaactgaccgacgaagttacccacatcgtggcagaaaatctgtcacgctctgaagtattggcttggctgaaagaacacaagatggagaagaccaagcaattcgaactgctggatattagctggcttatcgaaagcatgaaagttggtaaaccggtggacaccaaggggaaataccagttggcggaatcggttgaggtgagtgcgaacccagatccgacagaaggtcgtgtaaacgagctgcctcctactatgaaaaccgtttctccgtatgcgtgtcaacgccgcaccaccctgaacaaccgtaatcaacgttttacggactcgctggagattcttcgcgaaaattacgtgctgaaaggcaacgacgatactgcgctggaatttcgtcgtgctatctccgtgctgaaaagccttccgtttgaggtacgtagcctgaaagacacggaaggattgccctggatcagtgatgaagtcaaagggattatggaagaaatcatcgaagtcggggagtcgcgtgaagtgcaggccgtgctcaatgatgagtggtatcaaagcttccacgcatttacgcgtgtctttggagtgggggtgaagacagcagacaagtggtaccgcatgggtctgcgcaccctcgaggatgttcgttccagcaagaccctgaagttgaccccgtggcagaaagtaggtctgacgtattatgaagatcttgctcgcggcgttacgcgtgcggaagctgacgcgatttggctgctggttcaggatgcagtcgcaactttcgacccggatgcgatcgtggagattgtcggtggacagcgtcgtgggaaacctcagggtcacgacgttgatctgcttatcagttctccgggagctgaaaaagagcaagaagaccaactcctgcagaaagtgatgaatctgtggaagaaacaagggttgttgctgtgtggtcgtctggaatggagtcagtgggaatgggggggtctgccgtccggtaaggctgatgagggtgacggggaggcgtcgtgctttctgatcctcaaactttatgatcatctggtgcgtaaaagtaaacgcaatatgccgactggttcgaacatgggcgagtccaaaccgtggaaagcaattaaagtagatctgctgcgttgcccccgcggcagttttgcgtttgcgatgttgcagtggaccggaagccgcatgttccgtcgtgatctgcgcgattacgcccgcgaagagaagaacatgatgctggacaatcattcgctgtatgacatgactcgtggtatccaactccctgctaaatcggaagaggaaattttcgaacatctggggcttgaatacctggaaccgttcgaacgtaacgca

SEQ ID NO: 4916 - protein, 529 aa, synthetic construct
  REGION 1..529: note = Variant of terminal deoxynucleotidyltransferase
MHHHHHHGGSGSHGIRTIDSDFGKKQQKKGDNHDSSATYEIKFHEFVLFILEEKMGATRRTFLTDLARKKGFRVENELTDEVTHIVAENLSRSEVLAWLKEHKMEKTKQFELLDISWLIESMKVGKPVDTKGKYQLAESVEVSANPDPTEGRVNELPPTMKTVSPYACQRRTTLNNRNQRFTDSLEILRENYVLKGNDDTALEFRRAISVLKSLPFEVRSLKDTEGLPWISDEVKGIMEEIIEVGESREVQAVLNDEWYQSFHAFTRVFGVGVKTADKWYRMGLRTLEDVRSSKTLKLTPWQKVGLTYYEDLARGVTRAEADAIWLLVQDAVATFDPDAIVEIVGGQRRGKPQGHDVDLLISSPGAEKEQEDQLLQKVMNLWKKQGLLLCGRLEWSQWEWGGLPSGKADEGDGEASCFLILKLYDHLVRKSKRNMPTGSNMGESKPWKAIKVDLLRCPRGSFAFAMLQWTGSRMFRRDLRDYAREEKNMMLDNHSLYDMTRGIQLPAKSEEEIFEHLGLEYLEPFERNA

SEQ ID NO: 4917 - DNA, 1587 bp, synthetic construct
  misc_feature 1..1587: note = Variant of terminal deoxynucleotidyltransferase
  source 1..1587: mol_type = other DNA
atgcaccatcatcatcatcatggcggtagcggcagccacggcattcgtaccatcgattcggacttcgggaagaaacagcagaaaaaaggcgataaccacgatagttccgccacttatgaaatcaaatttcacgagtttgtgctgttcattctcgaagaaaaaatgggtgcgacgcgtcgtacttttctgacagatttagcccgcaagaaagggttccgcgtcgagaatgaactgaccgacgaagttacccacatcgtggcagaaaatctgtcacgctctgaagtattggcttggctgaaagaacacaagatggagaagaccaagcaattcgaactgctggatattagctggcttatcgaaagcatgaaagttggtaaaccggtggacaccaaggggaaataccagttggcggaatcggttgaggtgagtgcgaacccagatccgacagaaggtcgtgtaaacgagctgcctcctactatgaaaaccgtttctccgtatgcgtgtcaacgccgcaccaccctgaacaaccgtaatcaacgttttacggactcgctggagattcttcgcgaaaattacgtgctgaaaggcaacgacgatactgcgctggaatttcgtcgtgctatctccgtgctgaaaagccttccgtttgaggtacgtagcctgaaagacacggaaggattgccctggatcagtgatgaagtcaaagggattatggaagaaatcatcgaagtcggggagtcgcgtgaagtgcaggccgtgctcaatgatgagtggtatcaaagcttccacgcatttacgcgtgtctttggagtgggggtgaagacagcagacaagtggtaccgcatgggtctgcgcaccctcgaggatgttcgttccagcaagaccctgaagttgaccccgtggcagaaagtaggtctgacgtattatgaagatcttgctcgcggcgttacgcgtgcggaagctgacgcgatttggctgctggttcaggatgcagtcgcaactttcgacccggatgcgatcgtggagattgtcggtggacagcgtcgtgggaaacctcagggtcacgacgttgatctgcttatcagttctccgggagctgaaaaagagcaagaagaccaactcctgcagaaagtgatgaatctgtggaagaaacaagggttgttgctgtgtggtcgtctggaatggagtcagtgggaatgggggggtctgccgtccggtaaggctgatgagggtgacgcggaggcgtcgtgctttgggatcctcaaactttatgatcatctggtgcgtaaaagtaaacgcaatatgccgactggttcgaacatgggcgagtccaaaccgtggaaagcaattaaagtagatctgctgcgttgcccccgcggcagttttgcgtttgcgatgttgcagtggaccggaagccgcatgttccgtcgtgatctgcgcgattacgcccgcgaagagaagaacatgatgctggacaatcattcgctgtatgacatgactcgtggtatccaactccctgctaaatcggaagaggaaattttcgaacatctggggcttgaatacctggaaccgttcgaacgtaacgca

SEQ ID NO: 4918 - protein, 529 aa, synthetic construct
  REGION 1..529: note = Variant of terminal deoxynucleotidyltransferase
MHHHHHHGGSGSHGIRTIDSDFGKKQQKKGDNHDSSATYEIKFHEFVLFILEEKMGATRRTFLTDLARKKGFRVENELTDEVTHIVAENLSRSEVLAWLKEHKMEKTKQFELLDISWLIESMKVGKPVDTKGKYQLAESVEVSANPDPTEGRVNELPPTMKTVSPYACQRRTTLNNRNQRFTDSLEILRENYVLKGNDDTALEFRRAISVLKSLPFEVRSLKDTEGLPWISDEVKGIMEEIIEVGESREVQAVLNDEWYQSFHAFTRVFGVGVKTADKWYRMGLRTLEDVRSSKTLKLTPWQKVGLTYYEDLARGVTRAEADAIWLLVQDAVATFDPDAIVEIVGGQRRGKPQGHDVDLLISSPGAEKEQEDQLLQKVMNLWKKQGLLLCGRLEWSQWEWGGLPSGKADEGDAEASCFGILKLYDHLVRKSKRNMPTGSNMGESKPWKAIKVDLLRCPRGSFAFAMLQWTGSRMFRRDLRDYAREEKNMMLDNHSLYDMTRGIQLPAKSEEEIFEHLGLEYLEPFERNA

SEQ ID NO: 4919 - DNA, 1587 bp, synthetic construct
  misc_feature 1..1587: note = Variant of terminal deoxynucleotidyltransferase
  source 1..1587: mol_type = other DNA
atgcaccatcatcatcatcatggcggtagcggcagccacggcattcgtaccatcgattcggacttcgggaagaaacagcagaaaaaaggcgataaccacgatagttccgccacttatgaaatcaaatttcacgagtttgtgctgttcattctcgaagaaaaaatgggtgcgacgcgtcgtacttttctgacagatttagcccgcaagaaagggttccgcgtcgagaatgaactgaccgacgaagttacccacatcgtggcagaaaatctgtcacgctctgaagtattggcttggctgaaagaacacaagatggagaagaccaagcaattcgaactgctggatattagctggcttatcgaaagcatgaaagttggtaaaccggtggacaccaaggggaaataccagttggcggaatcggttgaggtgagtgcgaacccagatccgacagaaggtcgtgtaaacgagctgcctcctactatgaaaaccgtttctccgtatgcgtgtcaacgccgcaccaccctgaacaaccgtaatcaacgttttacggactcgctggagattcttcgcgaaaattacgtgctgaaaggcaacgacgatactgcgctggaatttcgtcgtgctatctccgtgctgaaaagccttccgtttgaggtacgtagcctgaaagacacggaaggattgccctggatcagtgatgaagtcaaagggattatggaagaaatcatcgaagtcggggagtcgcgtgaagtgcaggccgtgctcaatgatgagtggtatcaaagcttccacgcatttacgcgtgtctttggagtgggggtgaagacagcagacaagtggtaccgcatgggtctgcgcaccctcgaggatgttcgttccagcaagaccctgaagttgaccccgtggcagaaagtaggtctgacgtattatgaagatcttgctcgcggcgttacgcgtgcggaagctgacgcgatttggctgctggttcaggatgcagtcgcaactttcgacccggatgcgatcgtggagattgtcggtggacagcgtcgtgggaaacctcagggtcacgacgttgatctgcttatcagttctccgggagctgaaaaagagcaagaagaccaactcctgcagaaagtgatgaatctgtggaagaaacaagggttgttgctgtgtggtcgtctggaatggagtcagtgggaatgggggggtctgccgtccggtaaggctgatgagggtgacgcggaggcgtcgtgctttctgatcctcaaactttatgatcatctggtgcgtaaaagtaaacgcaatatgccgactggttcgaacatgggcgagtccaaaccgtggaaagcaattaaagtagatctgctgcgttgcccccgcggcagttttgcgtttgcgatgttgcagtggaccggaagccgcatgttccgtcgtgatctgcgcgattacgcccgcgaagagaagaacatggagctggacaatcattcgctgtatgacatgactcgtggtatccaactccctgctaaatcggaagaggaaattttcgaacatctggggcttgaatacctggaaccgttcgaacgtaacgca

SEQ ID NO: 4920 - protein, 529 aa, synthetic construct
  REGION 1..529: note = Variant of terminal deoxynucleotidyltransferase
MHHHHHHGGSGSHGIRTIDSDFGKKQQKKGDNHDSSATYEIKFHEFVLFILEEKMGATRRTFLTDLARKKGFRVENELTDEVTHIVAENLSRSEVLAWLKEHKMEKTKQFELLDISWLIESMKVGKPVDTKGKYQLAESVEVSANPDPTEGRVNELPPTMKTVSPYACQRRTTLNNRNQRFTDSLEILRENYVLKGNDDTALEFRRAISVLKSLPFEVRSLKDTEGLPWISDEVKGIMEEIIEVGESREVQAVLNDEWYQSFHAFTRVFGVGVKTADKWYRMGLRTLEDVRSSKTLKLTPWQKVGLTYYEDLARGVTRAEADAIWLLVQDAVATFDPDAIVEIVGGQRRGKPQGHDVDLLISSPGAEKEQEDQLLQKVMNLWKKQGLLLCGRLEWSQWEWGGLPSGKADEGDAEASCFLILKLYDHLVRKSKRNMPTGSNMGESKPWKAIKVDLLRCPRGSFAFAMLQWTGSRMFRRDLRDYAREEKNMELDNHSLYDMTRGIQLPAKSEEEIFEHLGLEYLEPFERNA

SEQ ID NO: 4921 - DNA, 1587 bp, synthetic construct
  misc_feature 1..1587: note = Variant of terminal deoxynucleotidyltransferase
  source 1..1587: mol_type = other DNA
atgcaccatcatcatcatcatggcggtagcggcagccacggcattcgtaccatcgattcggacttcgggaagaaacagcagaaaaaaggcgataaccacgatagttccgccacttatgaaatcaaatttcacgagtttgtgctgttcattctcgaagaaaaaatgggtgcgacgcgtcgtacttttctgacagatttagcccgcaagaaagggttccgcgtcgagaatgaactgaccgacgaagttacccacatcgtggcagaaaatctgtcacgctctgaagtattggcttggctgaaagaacacaagatggagaagaccaagcaattcgaactgctggatattagctggcttatcgaaagcatgaaagttggtaaaccggtggacaccaaggggaaataccagttggcggaatcggttgaggtgagtgcgaacccagatccgacagaaggtcgtgtaaacgagctgcctcctactatgaaaaccgtttctccgtatgcgtgtcaacgccgcaccaccctgaacaaccgtaatcaacgttttacggactcgctggagattcttcgcgaaaattacgtgctgaaaggcaacgacgatactgcgctggaatttcgtcgtgctatctccgtgctgaaaagccttccgtttgaggtacgtagcctgaaagacacggaaggattgccctggatcagtgatgaagtcaaagggattatggaagaaatcatcgaagtcggggagtcgcgtgaagtgcaggccgtgctcaatgatgagtggtatcaaagcttccacgcatttacgcgtgtctttggagtgggggtgaagacagcagacaagtggtaccgcatgggtctgcgcaccctcgaggatgttcgttccagcaagaccctgaagttgaccccgtggcagaaagtaggtctgacgtattatgaagatcttgctcgcggcgttacgcgtgcggaagctgacgcgatttggctgctggttcaggatgcagtcgcaactttcgacccggatgcgatcgtggagattgtcggtggacagcgtcgtgggaaacctcagggtcacgacgttgatctgcttatcagttctccgggagctgaaaaagagcaagaagaccaactcctgcagaaagtgatgaatctgtggaagaaacaagggttgttgctgtgtggtcgtgtggaatggagtcagtgggaatgggggggtctgccgtccggtaaggctgatgagggtgacgcggaggcgtcgtgctttctgatcctcaaactttatgatcatctggtgcgtaaaagtaaacgcaatatgccgactggttcgaacatgggcgagtccaaaccgtggaaagcaattaaagtagatctgctgcgttgcccccgcggcagttttgcgtttgcgatgttgcagtggaccggaagccgcatgttccgtcgtgatctgcgcgattacgcccgcgaagagaagaacatgatgctggacaatcattcgctgtatgacatgactcgtggtatccaactccctgctaaatcggaagaggaaattttcgaacatctggggcttgaatacctggaaccgttcgaacgtaacgca

SEQ ID NO: 4922 - protein, 529 aa, synthetic construct
  REGION 1..529: note = Variant of terminal deoxynucleotidyltransferase
MHHHHHHGGSGSHGIRTIDSDFGKKQQKKGDNHDSSATYEIKFHEFVLFILEEKMGATRRTFLTDLARKKGFRVENELTDEVTHIVAENLSRSEVLAWLKEHKMEKTKQFELLDISWLIESMKVGKPVDTKGKYQLAESVEVSANPDPTEGRVNELPPTMKTVSPYACQRRTTLNNRNQRFTDSLEILRENYVLKGNDDTALEFRRAISVLKSLPFEVRSLKDTEGLPWISDEVKGIMEEIIEVGESREVQAVLNDEWYQSFHAFTRVFGVGVKTADKWYRMGLRTLEDVRSSKTLKLTPWQKVGLTYYEDLARGVTRAEADAIWLLVQDAVATFDPDAIVEIVGGQRRGKPQGHDVDLLISSPGAEKEQEDQLLQKVMNLWKKQGLLLCGRVEWSQWEWGGLPSGKADEGDAEASCFLILKLYDHLVRKSKRNMPTGSNMGESKPWKAIKVDLLRCPRGSFAFAMLQWTGSRMFRRDLRDYAREEKNMMLDNHSLYDMTRGIQLPAKSEEEIFEHLGLEYLEPFERNA

SEQ ID NO: 4923 - DNA, 1587 bp, synthetic construct
  misc_feature 1..1587: note = Variant of terminal deoxynucleotidyltransferase
  source 1..1587: mol_type = other DNA
atgcaccatcatcatcatcatggcggtagcggcagccacggcattcgtaccatcgattcggacttcgggaagaaacagcagaaaaaaggcgataaccacgatagttccgccacttatgaaatcaaatttcacgagtttgtgctgttcattctcgaagaaaaaatgggtgcgacgcgtcgtacttttctgacagatttagcccgcaagaaagggttccgcgtcgagaatgaactgaccgacgaagttacccacatcgtggcagaaaatctgtcacgctctgaagtattggcttggctgaaagaacacaagatggagaagaccaagcaattcgaactgctggatattagctggcttatcgaaagcatgaaagttggtaaaccggtggacaccaaggggaaataccagttggcggaatcggttgaggtgagtgcgaacccagatccgacagaaggtcgtgtaaacgagctgcctcctactatgaaaaccgtttctccgtatgcgtgtcaacgccgcaccaccctgaacaaccgtaatcaacgttttacggactcgctggagattcttcgcgaaaattacgtgctgaaaggcaacgacgatactgcgctggaatttcgtcgtgctatctccgtgctgaaaagccttccgtttgaggtacgtagcctgaaagacacggaaggattgccctggatcagtgatgaagtcaaagggattatggaagaaatcatcgaagtcggggagtcgcgtgaagtgcaggccgtgctcaatgatgagtggtatcaaagcttccacgcatttacgcgtgtctttggagtgggggtgaagacagcagacaagtggtaccgcatgggtctgcgcaccctcgaggatgttcgttccagcaagaccctgaagttgaccccgtggtctaaagtaggtctgctgtattatgaagatcttgctcgcggcgttacgcgtgcggaagctgacgcgatttggctgctggttcaggatgcagtcgcaactttcgacccggatgcgatcgtggagattgtcggtggacagcgtcgtgggaaacctcagggtcacgacgttgatctgcttatcagttctccgggagctgaaaaagagcaagaagaccaactcctgcagaaagtgatgaatctgtggaagaaacaagggttgttgctgtgtggtcgtctggaatggagtcagtgggaatgggggggtctgccgtccggtaaggctgatgagggtgacgcggaggcgtcgtgctttctgatcctcaaactttatgatcatctggtgcgtaaaagtaaacgcaatatgccgactggttcgaacatgggcgagtccaaaccgtggaaagcaattaaagtagatctgctgcgttgcccccgcggcagttttgcgtttgcgatgttgcagtggaccggaagccgcatgttccgtcgtgatctgcgcgattacgcccgcgaagagaagaacatgatgctggacaatcattcgctgtatgacatgactcgtggtatccaactccctgctaaatcggaagaggaaattttcgaacatctggggcttgaatacctggaaccgttcgaacgtaacgca

SEQ ID NO: 4924 - protein, 529 aa, synthetic construct
  REGION 1..529: note = Variant of terminal deoxynucleotidyltransferase
MHHHHHHGGSGSHGIRTIDSDFGKKQQKKGDNHDSSATYEIKFHEFVLFILEEKMGATRRTFLTDLARKKGFRVENELTDEVTHIVAENLSRSEVLAWLKEHKMEKTKQFELLDISWLIESMKVGKPVDTKGKYQLAESVEVSANPDPTEGRVNELPPTMKTVSPYACQRRTTLNNRNQRFTDSLEILRENYVLKGNDDTALEFRRAISVLKSLPFEVRSLKDTEGLPWISDEVKGIMEEIIEVGESREVQAVLNDEWYQSFHAFTRVFGVGVKTADKWYRMGLRTLEDVRSSKTLKLTPWSKVGLLYYEDLARGVTRAEADAIWLLVQDAVATFDPDAIVEIVGGQRRGKPQGHDVDLLISSPGAEKEQEDQLLQKVMNLWKKQGLLLCGRLEWSQWEWGGLPSGKADEGDAEASCFLILKLYDHLVRKSKRNMPTGSNMGESKPWKAIKVDLLRCPRGSFAFAMLQWTGSRMFRRDLRDYAREEKNMMLDNHSLYDMTRGIQLPAKSEEEIFEHLGLEYLEPFERNA

SEQ ID NO: 4925 - DNA, 1587 bp, synthetic construct
  misc_feature 1..1587: note = Variant of terminal deoxynucleotidyltransferase
  source 1..1587: mol_type = other DNA
atgcaccatcatcatcatcatggcggtagcggcagccacggcattcgtaccatcgattcggacttcgggaagaaacagcagaaaaaaggcgataaccacgatagttccgccacttatgaaatcaaatttcacgagtttgtgctgttcattctcgaagaaaaaatgggtgcgacgcgtcgtacttttctgacagatttagcccgcaagaaagggttccgcgtcgagaatgaactgaccgacgaagttacccacatcgtggcagaaaatctgtcacgctctgaagtattggcttggctgaaagaacacaagatggagaagaccaagcaattcgaactgctggatattagctggcttatcgaaagcatgaaagttggtaaaccggtggacaccaaggggaaataccagttggcggaatcggttgaggtgagtgcgaacccagatccgacagaaggtcgtgtaaacgagctgcctcctactatgaaaaccgtttctccgtatgcgtgtcaacgccgcaccaccctgaacaaccgtaatcaacgttttacggactcgctggagattcttcgcgaaaattacgtgctgaaaggcaacgacgatactgcgctggaatttcgtcgtgctatctccgtgctgaaaagccttccgtttgaggtacgtagcctgaaagacacggaaggattgccctggatcagtgatgaagtcaaagggattatggaagaaatcatcgaagtcggggagtcgcgtgaagtgcaggccgtgctcaatgatgagtggtatcaaagcttccacgcatttacgcgtgtctttggagtgggggtgaagacagcagacaagtggtaccgcatgggtctgcgcaccctcgaggatgttcgttccagcaagaccctgaagttgaccccgtggcagaaagtaggtctgacgtattatgaagatcttgctcgcggcgtttgtcgtgcggaagctgacgcgatttggctgctggttcaggatgcagtcgcaactttcgacccggatgcgatcgtggagattgtcggtggacagcgtcgtgggaaacctcagggtcacgacgttgatctgcttatcagttctccgggagctgaaaaagagcaagaagaccaactcctgcagaaagtgatgaatctgtggaagaaacaagggttgttgctgtgtggtcgtctggaatggagtcagtgggaatgggggggtctgccgtccggtaaggctgatgagggtgacgcggaggcgtcgtgctttctgatcctcaaactttatgatcatctggtgcgtaaaagtaaacgcaatatgccgactggttcgaacatgggcgagtccaaaccgtggaaagcaattaaagtagatctgctgcgttgcccccgcggcagttttgcgtttgcgatgttgcagtggaccggaagccgcatgttccgtcgtgatctgcgcgattacgcccgcgaagagaagaacatgatgctggacaatcattcgctgtatgacatgactcgtggtatccaactccctgctaaatcggaagaggaaattttcgaacatctggggcttgaatacctggaaccgttcgaacgtaacgca

SEQ ID NO: 4926 - protein, 529 aa, synthetic construct
  REGION 1..529: note = Variant of terminal deoxynucleotidyltransferase
MHHHHHHGGSGSHGIRTIDSDFGKKQQKKGDNHDSSATYEIKFHEFVLFILEEKMGATRRTFLTDLARKKGFRVENELTDEVTHIVAENLSRSEVLAWLKEHKMEKTKQFELLDISWLIESMKVGKPVDTKGKYQLAESVEVSANPDPTEGRVNELPPTMKTVSPYACQRRTTLNNRNQRFTDSLEILRENYVLKGNDDTALEFRRAISVLKSLPFEVRSLKDTEGLPWISDEVKGIMEEIIEVGESREVQAVLNDEWYQSFHAFTRVFGVGVKTADKWYRMGLRTLEDVRSSKTLKLTPWQKVGLTYYEDLARGVCRAEADAIWLLVQDAVATFDPDAIVEIVGGQRRGKPQGHDVDLLISSPGAEKEQEDQLLQKVMNLWKKQGLLLCGRLEWSQWEWGGLPSGKADEGDAEASCFLILKLYDHLVRKSKRNMPTGSNMGESKPWKAIKVDLLRCPRGSFAFAMLQWTGSRMFRRDLRDYAREEKNMMLDNHSLYDMTRGIQLPAKSEEEIFEHLGLEYLEPFERNA

SEQ ID NO: 4927 - DNA, 1587 bp, synthetic construct
  misc_feature 1..1587: note = Variant of terminal deoxynucleotidyltransferase
  source 1..1587: mol_type = other DNA
atgcaccatcatcatcatcatggcggtagcggcagccacggcattcgtaccatcgattcggacttcgggaagaaacagcagaaaaaaggcgataaccacgatagttccgccacttatgaaatcaaatttcacgagtttgtgctgttcattctcgaagaaaaaatgggtgcgacgcgtcgtacttttctgacagatttagcccgcaagaaagggttccgcgtcgagaatgaactgaccgacgaagttacccacatcgtggcagaaaatctgtcacgctctgaagtattggcttggctgaaagaacacaagatggagaagaccaagcaattcgaactgctggatattagctggcttatcgaaagcatgaaagttggtaaaccggtggacaccaaggggaaataccagttggcggaatcggttgaggtgagtgcgaacccagatccgacagaaggtcgtgtaaacgagctgcctcctactatgaaaaccgtttctccgtatgcgtgtcaacgccgcaccaccctgaacaaccgtaatcaacgttttacggactcgctggagattcttcgcgaaaattacgtgctgaaaggcaacgacgatactgcgctggaatttcgtcgtgctatctccgtgctgaaaagccttccgtttgaggtacgtagcctgaaagacacggaaggattgccctggatcagtgatgaagtcaaagggattatggaagaaatcatcgaagtcggggagtcgcgtgaagtgcaggccgtgctcaatgatgagtggtatcaaagcttccacgcatttacgcgtgtctttggagtgggggtgaagacagcagacaagtggtaccgcatgggtctgcgcaccctcgaggatgttcgttccagcaagaccctgaagttgaccccgtggcagaaagtaggtctgacgtattatgaagatcttgctcgcggcgttacgcgtgcggaagctgacgcgatttggctgctggttcaggatgcagtcgcaactttcgacccggatgcgatcgtggagattgtcggtggacagcgtcgtgggaaacctcagggtcacgacgttgatctgcttatcagttctccgggagctgaaaaagagcaagaagaccaactcctgcagaaagtgatgaatctgtggaagaaacaagggttgttgctgtgtggtcgtctggaatatagtcagtgggaatgggggggtctgccgtccggtaaggctgatgagggtgacgcggaggcgtcgtgctttctgatcctcaaactttatgatcatctggtgcgtaaaagtaaacgcaatatgccgactggttcgaacatgggcgagtccaaaccgtggaaagcaattaaagtagatctgctgcgttgcccccgcggcagttttgcgtttgcgatgttgcagtggaccggaagccgcatgttccgtcgtgatctgcgcgattacgcccgcgaagagaagaacatgatgctggacaatcattcgctgtatgacatgactcgtggtatccaactccctgctaaatcggaagaggaaattttcgaacatctggggcttgaatacctggaaccgttcgaacgtaacgca

SEQ ID NO: 4928 - protein, 529 aa, synthetic construct
  REGION 1..529: note = Variant of terminal deoxynucleotidyltransferase
MHHHHHHGGSGSHGIRTIDSDFGKKQQKKGDNHDSSATYEIKFHEFVLFILEEKMGATRRTFLTDLARKKGFRVENELTDEVTHIVAENLSRSEVLAWLKEHKMEKTKQFELLDISWLIESMKVGKPVDTKGKYQLAESVEVSANPDPTEGRVNELPPTMKTVSPYACQRRTTLNNRNQRFTDSLEILRENYVLKGNDDTALEFRRAISVLKSLPFEVRSLKDTEGLPWISDEVKGIMEEIIEVGESREVQAVLNDEWYQSFHAFTRVFGVGVKTADKWYRMGLRTLEDVRSSKTLKLTPWQKVGLTYYEDLARGVTRAEADAIWLLVQDAVATFDPDAIVEIVGGQRRGKPQGHDVDLLISSPGAEKEQEDQLLQKVMNLWKKQGLLLCGRLEYSQWEWGGLPSGKADEGDAEASCFLILKLYDHLVRKSKRNMPTGSNMGESKPWKAIKVDLLRCPRGSFAFAMLQWTGSRMFRRDLRDYAREEKNMMLDNHSLYDMTRGIQLPAKSEEEIFEHLGLEYLEPFERNA

SEQ ID NO: 4929 - DNA, 1587 bp, synthetic construct
  misc_feature 1..1587: note = Variant of terminal deoxynucleotidyltransferase
  source 1..1587: mol_type = other DNA
atgcaccatcatcatcatcatggcggtagcggcagccacggcattcgtaccatcgattcggacttcgggaagaaacagcagaaaaaaggcgataaccacgatagttccgccacttatgaaatcaaatttcacgagtttgtgctgttcattctcgaagaaaaaatgggtgcgacgcgtcgtacttttctgacagatttagcccgcaagaaagggttccgcgtcgagaatgaactgaccgacgaagttacccacatcgtggcagaaaatctgtcacgctctgaagtattggcttggctgaaagaacacaagatggagaagaccaagcaattcgaactgctggatattagctggcttatcgaaagcatgaaagttggtaaaccggtggacaccaaggggaaataccagttggcggaatcggttgaggtgagtgcgaacccagatccgacagaaggtcgtgtaaacgagctgcctcctactatgaaaaccgtttctccgtatgcgtgtcaacgccgcaccaccctgaacaaccgtaatcaacgttttacggactcgctggagattcttcgcgaaaattacgtgctgaaaggcaacgacgatactgcgctggaatttcgtcgtgctatctccgtgctgaaaagccttccgtttgaggtacgtagcctgaaagacacggaaggattgccctggatcagtgatgaagtcaaagggattatggaagaaatcatcgaagtcggggagtcgcgtgaagtgcaggccgtgctcaatgatgagtggtatcaaagcttccacgcatttacgcgtgtctttggagtgggggtgaagacagcagacaagtggtaccgcatgggtctgcgcaccctcgaggatgttcgttccagcaagaccctgaagttgaccccgtggcagaaagtaggtctgacgtattatgaagatcttgctcgcggcgttacgcgtgcggaagctgacgcgatttggctgctggttcaggatgcagtcgcaactttcgacccggatgcgatcgtggagattgtcggtggacagcgtcgtgggaaacctcagggtcacgacgttgatctgcttatcagttctccgggagctgaaaaagagcaagaagaccaactcctgcagaaagtgatgaatctgtggaagaaacaagggttgttgctgtgtggtcgtctggaatggagtcagtgggaatgggggggtctgccgtccggtaaggctgatgagggtgacgcggaggcgtcgtgctttctgatcctcaaactttatgatcatctggtgcgtaaaagtaaacgcaatatgccgactggttcgaacatgggcgagtccaaaccgtggaaagcaattaaagtagatctgctgcgttgcccccgcggcagttttgcgtttgcgatgttgcagtggaccggaagccgcatgttccgtcaggatctgcgcgattacgcccgcgaagagaagaacatgatgctggacaatcattcgctgtatgacatgactcgtggtatccaactccctgctaaatcggaagaggaaattttcgaacatctggggcttgaatacctggaaccgttcgaacgtaacgca

SEQ ID NO: 4930 - protein, 529 aa, synthetic construct
  REGION 1..529: note = Variant of terminal deoxynucleotidyltransferase
MHHHHHHGGSGSHGIRTIDSDFGKKQQKKGDNHDSSATYEIKFHEFVLFILEEKMGATRRTFLTDLARKKGFRVENELTDEVTHIVAENLSRSEVLAWLKEHKMEKTKQFELLDISWLIESMKVGKPVDTKGKYQLAESVEVSANPDPTEGRVNELPPTMKTVSPYACQRRTTLNNRNQRFTDSLEILRENYVLKGNDDTALEFRRAISVLKSLPFEVRSLKDTEGLPWISDEVKGIMEEIIEVGESREVQAVLNDEWYQSFHAFTRVFGVGVKTADKWYRMGLRTLEDVRSSKTLKLTPWQKVGLTYYEDLARGVTRAEADAIWLLVQDAVATFDPDAIVEIVGGQRRGKPQGHDVDLLISSPGAEKEQEDQLLQKVMNLWKKQGLLLCGRLEWSQWEWGGLPSGKADEGDAEASCFLILKLYDHLVRKSKRNMPTGSNMGESKPWKAIKVDLLRCPRGSFAFAMLQWTGSRMFRQDLRDYAREEKNMMLDNHSLYDMTRGIQLPAKSEEEIFEHLGLEYLEPFERNA

SEQ ID NO: 4931 - DNA, 1587 bp, synthetic construct
  misc_feature 1..1587: note = Variant of terminal deoxynucleotidyltransferase
  source 1..1587: mol_type = other DNA
atgcaccatcatcatcatcatggcggtagcggcagccacggcattcgtaccatcgattcggacttcgggaagaaacagcagaaaaaaggcgataaccacgatagttccgccacttatgaaatcaaatttcacgagtttgtgctgttcattctcgaagaaaaaatgggtgcgacgcgtcgtacttttctgacagatttagcccgcaagaaagggttccgcgtcgagaatgaactgaccgacgaagttacccacatcgtggcagaaaatctgtcacgctctgaagtattggcttggctgaaagaacacaagatggagaagaccaagcaattcgaactgctggatattagctggcttatcgaaagcatgaaagttggtaaaccggtggacaccaaggggaaataccagttggcggaatcggttgaggtgagtgcgaacccagatccgacagaaggtcgtgtaaacgagctgcctcctactatgaaaaccgtttctccgtatgcgtgtcaacgccgcaccaccctgaacaaccgtaatcaacgttttacggactcgctggagattcttcgcgaaaattacgtgctgaaaggcaacgacgatactgcgctggaatttcgtcgtgctatctccgtgctgaaaagccttccgtttgaggtacgtagcctgaaagacacggaaggattgccctggatcagtgatgaagtcaaagggattatggaagaaatcatcgaagtcggggagtcgcgtgaagtgcaggccgtgctcaatgatgagtggtatcaaagcttccacgcatttacgcgtgtctttggagtgggggtgaagacagcagacaagtggtaccgcatgggtctgcgcaccctcgaggatgttcgttccagcaagaccctgaagttgaccccgtggcagaaagtaggtctgacgtattatgaagatcttgctcgcggcgttacgcgtgcggaagctgacgcgatttggctgctggttcaggatgcagtcgcaactttcgacccggatgcgatcgtggagattgtcggtggacagcgtcgtgggaaacctcagggtcacgacgttgatctgcttatcagttctccgggagctgaaaaagagcaagaagaccaactcctgcagaaagtgatgaatctgtggaagaaacaagggttgttgctgtgtggtcatctggaatggagtcagtgggaatgggggggtctgccgtccggtaaggctgatgagggtgacgcggaggcgtcgtgctttctgatcctcaaactttatgatcatctggtgcgtaaaagtaaacgcaatatgccgactggttcgaacatgggcgagtccaaaccgtggaaagcaattaaagtagatctgctgcgttgcccccgcggcagttttgcgtttgcgatgttgcagtggaccggaagccgcatgttccgtcgtgatctgcgcgattacgcccgcgaagagaagaacatgatgctggacaatcattcgctgtatgacatgactcgtggtatccaactccctgctaaatcggaagaggaaattttcgaacatctggggcttgaatacctggaaccgttcgaacgtaacgca

SEQ ID NO: 4932 - protein, 529 aa, synthetic construct
  REGION 1..529: note = Variant of terminal deoxynucleotidyltransferase
MHHHHHHGGSGSHGIRTIDSDFGKKQQKKGDNHDSSATYEIKFHEFVLFILEEKMGATRRTFLTDLARKKGFRVENELTDEVTHIVAENLSRSEVLAWLKEHKMEKTKQFELLDISWLIESMKVGKPVDTKGKYQLAESVEVSANPDPTEGRVNELPPTMKTVSPYACQRRTTLNNRNQRFTDSLEILRENYVLKGNDDTALEFRRAISVLKSLPFEVRSLKDTEGLPWISDEVKGIMEEIIEVGESREVQAVLNDEWYQSFHAFTRVFGVGVKTADKWYRMGLRTLEDVRSSKTLKLTPWQKVGLTYYEDLARGVTRAEADAIWLLVQDAVATFDPDAIVEIVGGQRRGKPQGHDVDLLISSPGAEKEQEDQLLQKVMNLWKKQGLLLCGHLEWSQWEWGGLPSGKADEGDAEASCFLILKLYDHLVRKSKRNMPTGSNMGESKPWKAIKVDLLRCPRGSFAFAMLQWTGSRMFRRDLRDYAREEKNMMLDNHSLYDMTRGIQLPAKSEEEIFEHLGLEYLEPFERNA

SEQ ID NO: 4933 - DNA, 1587 bp, synthetic construct
  misc_feature 1..1587: note = Variant of terminal deoxynucleotidyltransferase
  source 1..1587: mol_type = other DNA
atgcaccatcatcatcatcatggcggtagcggcagccacggcattcgtaccatcgattcggacttcgggaagaaacagcagaaaaaaggcgataaccacgatagttccgccacttatgaaatcaaatttcacgagtttgtgctgttcattctcgaagaaaaaatgggtgcgacgcgtcgtacttttctgacagatttagcccgcaagaaagggttccgcgtcgagaatgaactgaccgacgaagttacccacatcgtggcagaaaatctgtcacgctctgaagtattggcttggctgaaagaacacaagatggagaagaccaagcaattcgaactgctggatattagctggcttatcgaaagcatgaaagttggtaaaccggtggacaccaaggggaaataccagttggcggaatcggttgaggtgagtgcgaacccagatccgacagaaggtcgtgtaaacgagctgcctcctactatgaaaaccgtttctccgtatgcgtgtcaacgccgcaccaccctgaacaaccgtaatcaacgttttacggactcgctggagattcttcgcgaaaattacgtgctgaaaggcaacgacgatactgcgctggaatttcgtcgtgctatctccgtgctgaaaagccttccgtttgaggtacgtagcctgaaagacacggaaggattgccctggatcagtgatgaagtcaaagggattatggaagaaatcatcgaagtcggggagtcgcgtgaagtgcaggccgtgctcaatgatgagtggtatcaaagcttccacgcatttacgcgtgtctttggagtgggggtgaagacagcagacaagtggtaccgcatgggtctgcgcaccctcgaggatgttcgttccagcaagaccctgaagttgaccccgtggcagaaagtaggtctgacgtattatgaagatcttgctcgcggcgttacgcgtgcggaagctgacgcgatttggctgctggttcaggatgcagtcgcaactttcgacccggatgcgatcgtggagattgtcggtggacagcgtcgtgggaaacctcagggtcacgacgttgatctgcttatcagttctccgggagctgaaaaagagcaagaagaccaactcctgcagaaagtgatgaatctgtggaagaaacaagggttgttgctgtgtggtcgtctggaatggagtcagtgggaatgggggggtctgccgtccggtaaggctgatgagggtgacgcggaggcgtcgtgctttctgatcctcaaactttatgatcatctggtgcgtaaaagtaaacgcaatatgccgactggttcgaacatgggcgagtccaaaccgtggaaagcaattaaagtagatctgctgcgttgcccccgcggcagttttgcgtttgcgatgttgcagtggaccggaagccgcatgttccgtcgtgatctgcgcgattacgcccgcgaagagaagaacatgatgctggacaatcatcgtctgtatgacatgactcgtggtatccaactccctgctaaatcggaagaggaaattttcgaacatctggggcttgaatacctggaaccgttcgaacgtaacgca

SEQ ID NO: 4934 - protein, 529 aa, synthetic construct
  REGION 1..529: note = Variant of terminal deoxynucleotidyltransferase
MHHHHHHGGSGSHGIRTIDSDFGKKQQKKGDNHDSSATYEIKFHEFVLFILEEKMGATRRTFLTDLARKKGFRVENELTDEVTHIVAENLSRSEVLAWLKEHKMEKTKQFELLDISWLIESMKVGKPVDTKGKYQLAESVEVSANPDPTEGRVNELPPTMKTVSPYACQRRTTLNNRNQRFTDSLEILRENYVLKGNDDTALEFRRAISVLKSLPFEVRSLKDTEGLPWISDEVKGIMEEIIEVGESREVQAVLNDEWYQSFHAFTRVFGVGVKTADKWYRMGLRTLEDVRSSKTLKLTPWQKVGLTYYEDLARGVTRAEADAIWLLVQDAVATFDPDAIVEIVGGQRRGKPQGHDVDLLISSPGAEKEQEDQLLQKVMNLWKKQGLLLCGRLEWSQWEWGGLPSGKADEGDAEASCFLILKLYDHLVRKSKRNMPTGSNMGESKPWKAIKVDLLRCPRGSFAFAMLQWTGSRMFRRDLRDYAREEKNMMLDNHRLYDMTRGIQLPAKSEEEIFEHLGLEYLEPFERNA

SEQ ID NO: 4935 - DNA, 1587 bp, synthetic construct
  misc_feature 1..1587: note = Variant of terminal deoxynucleotidyltransferase
  source 1..1587: mol_type = other DNA
atgcaccatcatcatcatcatggcggtagcggcagccacggcattcgtaccatcgattcggacttcgggaagaaacagcagaaaaaaggcgataaccacgatagttccgccacttatgaaatcaaatttcacgagtttgtgctgttcattctcgaagaaaaaatgggtgcgacgcgtcgtacttttctgacagatttagcccgcaagaaagggttccgcgtcgagaatgaactgaccgacgaagttacccacatcgtggcagaaaatctgtcacgctctgaagtattggcttggctgaaagaacacaagatggagaagaccaagcaattcgaactgctggatattagctggcttatcgaaagcatgaaagttggtaaaccggtggacaccaaggggaaataccagttggcggaatcggttgaggtgagtgcgaacccagatccgacagaaggtcgtgtaaacgagctgcctcctactatgaaaaccgtttctccgtatgcgtgtcaacgccgcaccaccctgaacaaccgtaatcaacgttttacggactcgctggagattcttcgcgaaaattacgtgctgaaaggcaacgacgatactgcgctggaatttcgtcgtgctatctccgtgctgaaaagccttccgtttgaggtacgtagcctgaaagacacggaaggattgccctggatcagtgatgaagtcaaagggattatggaagaaatcatcgaagtcggggagtcgcgtgaagtgcaggccgtgctcaatgatgagtggtatcaaagcttccacgcatttacgcgtgtctttggagtgggggtgaagacagcagacaagtggtaccgcatgggtctgcgcaccctcgaggatgttcgttccagcaagaccctgaagttgaccccgtggcagaaagtaggtctgacgtattatgaagatcttgctcgcggcgttacgcgtgcggaagctgacgcgatttggctgctggttcaggatgcagtcgcaactttcgacccggatgcgatcgtggagattgtcggtggacagcgtcgtgggaaacctcagggtcacgacgttgatctgcttatcagttctccgggagctgaaaaagagcaagaagaccaactcctgcagaaagtgatgaatctgtggaagaaacaagggttgttgctgtgtggtcgtctggaatggagtcagtgggaatgggggggtctgccgtccggtaaggctgatgagggtgacgcggaggcgtcgtgctttctgatcctcaaactttatgatcatctggtgcgtaaaagtaaacgcaatatgccgactggttcgaacatgggcgagtccaaaccgtggaaagcaattaaagtagatctgctgcgttgcccccgcggcagttttgcgtttgcgatgttgcagtggaccggaagccgcatgttccgtcgtgatctgcgcgattacgcccgcgaagagaagaacatgcagctggacaatcattcgctgtatgacatgactcgtggtatccaactccctgctaaatcggaagaggaaattttcgaacatctggggcttgaatacctggaaccgttcgaacgtaacgca

SEQ ID NO: 4936 - protein, 529 aa, synthetic construct
  REGION 1..529: note = Variant of terminal deoxynucleotidyltransferase
MHHHHHHGGSGSHGIRTIDSDFGKKQQKKGDNHDSSATYEIKFHEFVLFILEEKMGATRRTFLTDLARKKGFRVENELTDEVTHIVAENLSRSEVLAWLKEHKMEKTKQFELLDISWLIESMKVGKPVDTKGKYQLAESVEVSANPDPTEGRVNELPPTMKTVSPYACQRRTTLNNRNQRFTDSLEILRENYVLKGNDDTALEFRRAISVLKSLPFEVRSLKDTEGLPWISDEVKGIMEEIIEVGESREVQAVLNDEWYQSFHAFTRVFGVGVKTADKWYRMGLRTLEDVRSSKTLKLTPWQKVGLTYYEDLARGVTRAEADAIWLLVQDAVATFDPDAIVEIVGGQRRGKPQGHDVDLLISSPGAEKEQEDQLLQKVMNLWKKQGLLLCGRLEWSQWEWGGLPSGKADEGDAEASCFLILKLYDHLVRKSKRNMPTGSNMGESKPWKAIKVDLLRCPRGSFAFAMLQWTGSRMFRRDLRDYAREEKNMQLDNHSLYDMTRGIQLPAKSEEEIFEHLGLEYLEPFERNA

SEQ ID NO: 4937 - DNA, 1587 bp, synthetic construct
  misc_feature 1..1587: note = Variant of terminal deoxynucleotidyltransferase
  source 1..1587: mol_type = other DNA
atgcaccatcatcatcatcatggcggtagcggcagccacggcattcgtaccatcgattcggacttcgggaagaaacagcagaaaaaaggcgataaccacgatagttccgccacttatgaaatcaaatttcacgagtttgtgctgttcattctcgaagaaaaaatgggtgcgacgcgtcgtacttttctgacagatttagcccgcaagaaagggttccgcgtcgagaatgaactgaccgacgaagttacccacatcgtggcagaaaatctgtcacgctctgaagtattggcttggctgaaagaacacaagatggagaagaccaagcaattcgaactgctggatattagctggcttatcgaaagcatgaaagttggtaaaccggtggacaccaaggggaaataccagttggcggaatcggttgaggtgagtgcgaacccagatccgacagaaggtcgtgtaaacgagctgcctcctactatgaaaaccgtttctccgtatgcgtgtcaacgccgcaccaccctgaacaaccgtaatcaacgttttacggactcgctggagattcttcgcgaaaattacgtgctgaaaggcaacgacgatactgcgctggaatttcgtcgtgctatctccgtgctgaaaagccttccgtttgaggtacgtagcctgaaagacacggaaggattgccctggatcagtgatgaagtcaaagggattatggaagaaatcatcgaagtcggggagtcgcgtgaagtgcaggccgtgctcaatgatgagtggtatcaaagcttccacgcatttacgcgtgtctttggagtgggggtgaagacagcagacaagtggtaccgcatgggtctgcgcaccctcgaggatgttcgttccagcaagaccctgaagttgaccccgtggcagaaagtaggtctgacgtattatgaagatcttgctcgcggcgttacgcgtgcggaagctgacgcgatttggctgctggttcaggatgcagtcgcaactttcgacccggatgcgatcgtggagattgtcggtggacagcgtcgtgggaaacctcagggtcacgacgttgatctgcttatcagttctccgggagctgaaaaagagcaagaagaccaactcctgcagaaagtgatgaatctgtggaagaaacaagggttgttgctgtgtggtcgtctggaatggagtcagtgggaatgggggggtctgccgtccggtaaggctgatgagggtgacgcggaggcgtcgtgctttgtgatcctcaaactttatgatcatctggtgcgtaaaagtaaacgcaatatgccgactggttcgaacatgggcgagtccaaaccgtggaaagcaattaaagtagatctgctgcgttgcccccgcggcagttttgcgtttgcgatgttgcagtggaccggaagccgcatgttccgtcgtgatctgcgcgattacgcccgcgaagagaagaacatgatgctggacaatcattcgctgtatgacatgactcgtggtatccaactccctgctaaatcggaagaggaaattttcgaacatctggggcttgaatacctggaaccgttcgaacgtaacgca

SEQ ID NO: 4938 - protein, 529 aa, synthetic construct
  REGION 1..529: note = Variant of terminal deoxynucleotidyltransferase
MHHHHHHGGSGSHGIRTIDSDFGKKQQKKGDNHDSSATYEIKFHEFVLFILEEKMGATRRTFLTDLARKKGFRVENELTDEVTHIVAENLSRSEVLAWLKEHKMEKTKQFELLDISWLIESMKVGKPVDTKGKYQLAESVEVSANPDPTEGRVNELPPTMKTVSPYACQRRTTLNNRNQRFTDSLEILRENYVLKGNDDTALEFRRAISVLKSLPFEVRSLKDTEGLPWISDEVKGIMEEIIEVGESREVQAVLNDEWYQSFHAFTRVFGVGVKTADKWYRMGLRTLEDVRSSKTLKLTPWQKVGLTYYEDLARGVTRAEADAIWLLVQDAVATFDPDAIVEIVGGQRRGKPQGHDVDLLISSPGAEKEQEDQLLQKVMNLWKKQGLLLCGRLEWSQWEWGGLPSGKADEGDAEASCFVILKLYDHLVRKSKRNMPTGSNMGESKPWKAIKVDLLRCPRGSFAFAMLQWTGSRMFRRDLRDYAREEKNMMLDNHSLYDMTRGIQLPAKSEEEIFEHLGLEYLEPFERNA

SEQ ID NO: 4939 - DNA, 1587 bp, synthetic construct
  misc_feature 1..1587: note = Variant of terminal deoxynucleotidyltransferase
  source 1..1587: mol_type = other DNA
atgcaccatcatcatcatcatggcggtaacggcagccacggcattcgtaccatcgattcggacttcgggaagaaacagcagaaaaaaggcgataaccacgatagttccgccacttatgaaatcaaatttcacgagtttgtgctgttcattctcgaagaaaaaatgggtgcgacgcgtcgtacttttctgacagatttagcccgcaagaaagggttccgcgtcgagaatgaactgaccgacgaagttacccacatcgtggcagaaaatctgtcacgctctgaagtattggcttggctgaaagaacacaagatggagaagaccaagcaattcgaactgctggatattagctggcttatcgaaagcatgaaagttggtaaaccggtggacaccaaggggaaataccagttggcggaatcggttgaggtgagtgcgaacccagatccgacagaaggtcgtgtaaacgagctgcctcctactatgaaaaccgtttctccgtatgcgtgtcaacgccgcaccaccctgaacaaccgtaatcaacgttttacggactcgctggagattcttcgcgaaaattacgtgctgaaaggcaacgacgatactgcgctggaatttcgtcgtgctatctccgtgctgaaaagccttccgtttgaggtacgtagcctgaaagacacggaaggattgccctggatcagtgatgaagtcaaagggattatggaagaaatcatcgaagtcggggagtcgcgtgaagtgcaggccgtgctcaatgatgagtggtatcaaagcttccacgcatttacgcgtgtctttggagtgggggtgaagacagcagacaagtggtaccgcatgggtctgcgcaccctcgaggatgttcgttccagcaagaccctgaagttgaccccgtggcagaaagtaggtctgacgtattatgaagatcttgctcgcggcgttacgcgtgcggaagctgacgcgatttggctgctggttcaggatgcagtcgcaactttcgacccggatgcgatcgtggagattgtcggtggacagcgtcgtgggaaacctcagggtcacgacgttgatctgcttatcagttctccgggagctgaaaaagagcaagaagaccaactcctgcagaaagtgatgaatctgtggaagaaacaagggttgttgctgtgtggtcgtctggaatggagtcagtgggaatgggggggtctgccgtccggtaaggctgatgagggtgactcggaggcgtcgtgctttctgatcctcaaactttatgatcatctggtgcgtaaaagtaaacgcaatatgccgactggttcgaacatgggcgagtccaaaccgtggaaagcaattaaagtagatctgctgcgttgcccccgcggcagttttgcgtttgcgatgttgcagtggaccggaagccgcatgttccgtcgtgatctgcgcgattacgcccgcgaagagaagaacatgatgctggacaatcattcgctgtatgacatgactcgtggtatccaactccctgctaaatcggaagaggaaattttcgaacatctggggcttgaatacctggaaccgttcgaacgtaacgca

SEQ ID NO: 4940 - protein, 529 aa, synthetic construct
  REGION 1..529: note = Variant of terminal deoxynucleotidyltransferase
MHHHHHHGGNGSHGIRTIDSDFGKKQQKKGDNHDSSATYEIKFHEFVLFILEEKMGATRRTFLTDLARKKGFRVENELTDEVTHIVAENLSRSEVLAWLKEHKMEKTKQFELLDISWLIESMKVGKPVDTKGKYQLAESVEVSANPDPTEGRVNELPPTMKTVSPYACQRRTTLNNRNQRFTDSLEILRENYVLKGNDDTALEFRRAISVLKSLPFEVRSLKDTEGLPWISDEVKGIMEEIIEVGESREVQAVLNDEWYQSFHAFTRVFGVGVKTADKWYRMGLRTLEDVRSSKTLKLTPWQKVGLTYYEDLARGVTRAEADAIWLLVQDAVATFDPDAIVEIVGGQRRGKPQGHDVDLLISSPGAEKEQEDQLLQKVMNLWKKQGLLLCGRLEWSQWEWGGLPSGKADEGDSEASCFLILKLYDHLVRKSKRNMPTGSNMGESKPWKAIKVDLLRCPRGSFAFAMLQWTGSRMFRRDLRDYAREEKNMMLDNHSLYDMTRGIQLPAKSEEEIFEHLGLEYLEPFERNA

SEQ ID NO: 4941 - DNA, 1587 bp, synthetic construct
  misc_feature 1..1587: note = Variant of terminal deoxynucleotidyltransferase
  source 1..1587: mol_type = other DNA
atgcaccatcatcatcatcatggcggtagcggcagccacggcattcgtaccatcgattcggacttcgggaagaaacagcagaaaaaaggcgataaccacgatagttccgccacttatgaaatcaaatttcacgagtttgtgctgttcattctcgaagaaaaaatgggtgcgacgcgtcgtacttttctgacagatttagcccgcaagaaagggttccgcgtcgagaatgaactgaccgacgaagttacccacatcgtggcagaaaatctgtcacgctctgaagtattggcttggctgaaagaacacaagatggagaagaccaagcaattcgaactgctggatattagctggcttatcgaaagcatgaaagttggtaaaccggtggacaccaaggggaaataccagttggcggaatcggttgaggtgagtgcgaacccagatccgacagaaggtcgtgtaaacgagctgcctcctactatgaaaaccgtttctccgtatgcgtgtcaacgccgcaccaccctgaacaaccgtaatcaacgttttacggactcgctggagattcttcgcgaaaattacgtgctgaaaggcaacgacgatactgcgctggaatttcgtcgtgctatctccgtgctgaaaagccttccgtttgaggtacgtagcctgaaagacacggaaggattgccctggatcagtgatgaagtcaaagggattatggaagaaatcatcgaagtcggggagtcgcgtgaagtgcaggccgtgctcaatgatgagtggtatcaaagcttccacgcatttacgcgtgtctttggagtgggggtgaagacagcagacaagtggtaccgcatgggtctgcgcaccctcgaggatgttcgttccagcaagaccctgaagttgaccccgtggcagaaagtaggtctgacgtattatgaagatcttgctcgcggcgttacgcgtgcggaagctgacgcgatttggctgctggttcaggatgcagtcgcaactttcgacccggatgcgatcgtggagattgtcggtggacagcgtcgtgggaaacctcagggtcacgacgttgatctgcttatcagttctccgggagctgaaaaagagcaagaagaccaactcctgcagaaagtgatgaatctgtggaagaaacaagggttgttgctgtgtggtcgtctggaatggagttcgtgggaatgggggggtctgccgtccggtaaggctgatgagggtgacgcggaggcgtcgtgctttctgatcctcaaactttatgatcatctggtgcgtaaaagtaaacgcaatatgccgactggttcgaacatgggcgagtccaaaccgtggaaagcaattaaagtagatctgctgcgttgcccccgcggcagttttgcgtttgcgatgttgcagtggaccggaagccgcatgttccgtcgtgatctgcgcgattacgcccgcgaagagaagaacatgatgctggacaatcattcgctgtatgacatgactcgtggtatccaactccctgctaaatcggaagaggaaattttcgaacatctggggcttgaatacctggaaccgttcgaacgtaacgca

SEQ ID NO: 4942 - protein, 529 aa, synthetic construct
  REGION 1..529: note = Variant of terminal deoxynucleotidyltransferase
MHHHHHHGGSGSHGIRTIDSDFGKKQQKKGDNHDSSATYEIKFHEFVLFILEEKMGATRRTFLTDLARKKGFRVENELTDEVTHIVAENLSRSEVLAWLKEHKMEKTKQFELLDISWLIESMKVGKPVDTKGKYQLAESVEVSANPDPTEGRVNELPPTMKTVSPYACQRRTTLNNRNQRFTDSLEILRENYVLKGNDDTALEFRRAISVLKSLPFEVRSLKDTEGLPWISDEVKGIMEEIIEVGESREVQAVLNDEWYQSFHAFTRVFGVGVKTADKWYRMGLRTLEDVRSSKTLKLTPWQKVGLTYYEDLARGVTRAEADAIWLLVQDAVATFDPDAIVEIVGGQRRGKPQGHDVDLLISSPGAEKEQEDQLLQKVMNLWKKQGLLLCGRLEWSSWEWGGLPSGKADEGDAEASCFLILKLYDHLVRKSKRNMPTGSNMGESKPWKAIKVDLLRCPRGSFAFAMLQWTGSRMFRRDLRDYAREEKNMMLDNHSLYDMTRGIQLPAKSEEEIFEHLGLEYLEPFERNA

SEQ ID NO: 4943 - DNA, 1587 bp, synthetic construct
  misc_feature 1..1587: note = Variant of terminal deoxynucleotidyltransferase
  source 1..1587: mol_type = other DNA
atgcaccatcatcatcatcatggcggtagcggcagccacggcattcgtaccatcgattcggacttcgggaagaaacagcagaaaaaaggcgataaccacgatagttccgccacttatgaaatcaaatttcacgagtttgtgctgttcattctcgaagaaaaaatgggtgcgacgcgtcgtacttttctgacagatttagcccgcaagaaagggttccgcgtcgagaatgaactgaccgacgaagttacccacatcgtggcagaaaatctgtcacgctctgaagtattggcttggctgaaagaacacaagatggagaagaccaagcaattcgaactgctggatattagctggcttatcgaaagcatgaaagttggtaaaccggtggacaccaaggggaaataccagttggcggaatcggttgaggtgagtgcgaacccagatccgacagaaggtcgtgtaaacgagctgcctcctactatgaaaaccgtttctccgtatgcgtgtcaacgccgcaccaccctgaacaaccgtaatcaacgttttacggactcgctggagattcttcgcgaaaattacgtgctgaaaggcaacgacgatactgcgctggaatttcgtcgtgctatctccgtgctgaaaagccttccgtttgaggtacgtagcctgaaagacacggaaggattgccctggatcagtgatgaagtcaaagggattatggaagaaatcatcgaagtcggggagtcgcgtgaagtgcaggccgtgctcaatgatgagtggtatcaaagcttccacgcatttacgcgtgtctttggagtgggggtgaagacagcagacaagtggtaccgcatgggtctgcgcaccctcgaggatgttcgttccagcaagaccctgaagttgaccccgtggcagaaagtaggtctgacgtattatgaagatcttgctcgcggcgttacgcgtgcggaagctgacgcgatttggctgctggttcaggatgcagtcgcaactttcgacccggatgcgatcgtggagattgtcggtggacagcgtcgtgggaaacctcagggtcacgacgttgatctgcttatcagttctccgggagctgaaaaagagcaagaagaccaactcctgcagaaagtgatgaatctgtggaagaaacaagggttgttgctgtgtggtcgtctggaatggagtcagtgggaatgggggggtctgccgtccggtaaggctgatgagggtgacgcggaggcgtcgtgctttctgatcctcaaactttatgatcatctggtgcgtaaaagtaaacgcaatatgtcgactggttcgaacatgggcgagtccaaaccgtggaaagcaattaaagtagatctgctgcgttgcccccgcggcagttttgcgtttgcgatgttgcagtggaccggaagccgcatgttccgtcgtgatctgcgcgattacgcccgcgaagagaagaacatgatgctggacaatcattcgctgtatgacatgactcgtggtatccaactccctgctaaatcggaagaggatattttcgaacatctggggcttgaatacctggaaccgttcgaacgtaacgca

SEQ ID NO: 4944 - protein, 529 aa, synthetic construct
  REGION 1..529: note = Variant of terminal deoxynucleotidyltransferase
MHHHHHHGGSGSHGIRTIDSDFGKKQQKKGDNHDSSATYEIKFHEFVLFILEEKMGATRRTFLTDLARKKGFRVENELTDEVTHIVAENLSRSEVLAWLKEHKMEKTKQFELLDISWLIESMKVGKPVDTKGKYQLAESVEVSANPDPTEGRVNELPPTMKTVSPYACQRRTTLNNRNQRFTDSLEILRENYVLKGNDDTALEFRRAISVLKSLPFEVRSLKDTEGLPWISDEVKGIMEEIIEVGESREVQAVLNDEWYQSFHAFTRVFGVGVKTADKWYRMGLRTLEDVRSSKTLKLTPWQKVGLTYYEDLARGVTRAEADAIWLLVQDAVATFDPDAIVEIVGGQRRGKPQGHDVDLLISSPGAEKEQEDQLLQKVMNLWKKQGLLLCGRLEWSQWEWGGLPSGKADEGDAEASCFLILKLYDHLVRKSKRNMSTGSNMGESKPWKAIKVDLLRCPRGSFAFAMLQWTGSRMFRRDLRDYAREEKNMMLDNHSLYDMTRGIQLPAKSEEDIFEHLGLEYLEPFERNA

SEQ ID NO: 4945 - DNA, 1587 bp, synthetic construct
  misc_feature 1..1587: note = Variant of terminal deoxynucleotidyltransferase
  source 1..1587: mol_type = other DNA
atgcaccatcatcatcatcatggcggtagcggcagccacggcattcgtaccatcgattcggacttcgggaagaaacagcagaaaaaaggcgataaccacgatagttccgccacttatgaaatcaaatttcacgagtttgtgctgttcattctcgaagaaaaaatgggtgcgacgcgtcgtacttttctgacagatttagcccgcaagaaagggttccgcgtcgagaatgaactgaccgacgaagttacccacatcgtggcagaaaatctgtcacgctctgaagtattggcttggctgaaagaacacaagatggagaagaccaagcaattcgaactgctggatattagctggcttatcgaaagcatgaaagttggtaaaccggtggacaccaaggggaaataccagttggcggaatcggttgaggtgagtgcgaacccagatccgacagaaggtcgtgtaaacgagctgcctcctactatgaaaaccgtttctccgtatgcgtgtcaacgccgcaccaccctgaacaaccgtaatcaacgttttacggactcgctggagattcttcgcgaaaattacgtgctgaaaggcaacgacgatactgcgctggaatttcgtcgtgctatctccgtgctgaaaagccttccgtttgaggtacgtagcctgaaagacacggaaggattgccctggatcagtgatgaagtcaaagggattatggaagaaatcatcgaagtcggggagtcgcgtgaagtgcaggccgtgctcaatgatgagtggtatcaaagcttccacgcatttacgcgtgtctttggagtgggggtgaagacagcagacaagtggtaccgcatgggtctgcgcaccctcgaggatgttcgttccagcaagaccctgaagttgaccccgtggcagaaagtaggtctgacgtattatgaagatcttgctcgcggcgttacgcgtgcggaagctgacgcgatttggctgctggttcaggatgcagtcgcaactttcgacccggatgcgatcgtggagattgtcggtggacagcgtcgtgggaaacctcagggtcacgacgttgatctgcttatcagttctccgggagctgaaaaagagcaagaagaccaactcctgcagaaagtgatgaatctgtggaagaaacaagggttgttgctgtgtggtcgtctggaatggagtcagtgggaatgggggggtctgccgtccggtaaggctgatgagggtgacgcggaggcgtcgtgctttctgatcctcaaactttatgatcatctggtgcgtaaaagtaaacgcaatatgccgactggttcgaacatgggcgagtccaaaccgtggaaagcaattaaagtagatctgctgcgttgcccccgcggcagttttgcgtttgcgatgttgcagtggaccggaagccgcatgttccgttcggatctgcgcgattacgcccgcgaagagaagaacatgatgctggacaatcattcgctgtatgacatgactcgtggtatccaactccctgctaaatcggaagaggaaattttcgaacatctggggcttgaatacctggaaccgttcgaacgtaacgca

SEQ ID NO: 4946 - protein, 529 aa, synthetic construct
  REGION 1..529: note = Variant of terminal deoxynucleotidyltransferase
MHHHHHHGGSGSHGIRTIDSDFGKKQQKKGDNHDSSATYEIKFHEFVLFILEEKMGATRRTFLTDLARKKGFRVENELTDEVTHIVAENLSRSEVLAWLKEHKMEKTKQFELLDISWLIESMKVGKPVDTKGKYQLAESVEVSANPDPTEGRVNELPPTMKTVSPYACQRRTTLNNRNQRFTDSLEILRENYVLKGNDDTALEFRRAISVLKSLPFEVRSLKDTEGLPWISDEVKGIMEEIIEVGESREVQAVLNDEWYQSFHAFTRVFGVGVKTADKWYRMGLRTLEDVRSSKTLKLTPWQKVGLTYYEDLARGVTRAEADAIWLLVQDAVATFDPDAIVEIVGGQRRGKPQGHDVDLLISSPGAEKEQEDQLLQKVMNLWKKQGLLLCGRLEWSQWEWGGLPSGKADEGDAEASCFLILKLYDHLVRKSKRNMPTGSNMGESKPWKAIKVDLLRCPRGSFAFAMLQWTGSRMFRSDLRDYAREEKNMMLDNHSLYDMTRGIQLPAKSEEEIFEHLGLEYLEPFERNA

SEQ ID NO: 4947 - DNA, 1587 bp, synthetic construct
  misc_feature 1..1587: note = Variant of terminal deoxynucleotidyltransferase
  source 1..1587: mol_type = other DNA
atgcaccatcatcatcatcatggcggtagcggcagccacggcattcgtaccatcgattcggacttcgggaagaaacagcagaaaaaaggcgataaccacgatagttccgccacttatgaaatcaaatttcacgagtttgtgctgttcattctcgaagaaaaaatgggtgcgacgcgtcgtacttttctgacagatttagcccgcaagaaagggttccgcgtcgagaatgaactgaccgacgaagttacccacatcgtggcagaaaatctgtcacgctctgaagtattggcttggctgaaagaacacaagatggagaagaccaagcaattcgaactgctggatattagctggcttatcgaaagcatgaaagttggtaaaccggtggacaccaaggggaaataccagttggcggaatcggttgaggtgagtgcgaacccagatccgacagaaggtcgtgtaaacgagctgcctcctactatgaaaaccgtttctccgtatgcgtgtcaacgccgcaccaccctgaacaaccgtaatcaacgttttacggactcgctggagattcttcgcgaaaattacgtgctgaaaggcaacgacgatactgcgctggaatttcgtcgtgctatctccgtgctgaaaagccttccgtttgaggtacgtagcctgaaagacacggaaggattgccctggatcagtgatgaagtcaaagggattatggaagaaatcatcgaagtcggggagtcgcgtgaagtgcaggccgtgctcaatgatgagtggtatcaaagcttccacgcatttacgcgtgtctttggagtgggggtgaagacagcagacaagtggtaccgcatgggtctgcgcaccctcgaggatgttcgttccagcaagaccctgaagttgaccccgtggcagaaagtaggtctgacgtattatgaagatcttgctcgcggcgttacgcgtgcggaagctgacgcgatttggctgctggttcaggatgcagtcgcaactttcgacccggatgcgatcgtggagattgtcggtggacagcgtcgtgggaaacctcagggtcacgacgttgatctgcttatcagttctccgggagctgaaaaagagcaagaagaccaactcctgcagaaagtgatgaatctgtggaagaaacaagggttgttgctgtgtggtcgtctggaatggagtcagtgggaatggggggtgctgccgtccggtaaggctgatgagggtgacgcggaggcgtcgtgctttctgatcctcaaactttatgatcatctggtgcgtaaaagtaaacgcaatatgccgactggttcgaacatgggcgagtccaaaccgtggaaagcaattaaagtagatctgctgcgttgcccccgcggcagttttgcgtttgcgatgttgcagtggaccggaagccgcatgttccgtcgtgatctgcgcgattacgcccgcgaagagaagaacatgatgctggacaatcattcgctgtatgacatgactcgtggtatccaactccctgctaaatcggaagaggaaattttcgaacatctggggcttgaatacctggaaccgttcgaacgtaacgca

SEQ ID NO: 4948 - protein, 529 aa, synthetic construct
  REGION 1..529: note = Variant of terminal deoxynucleotidyltransferase
MHHHHHHGGSGSHGIRTIDSDFGKKQQKKGDNHDSSATYEIKFHEFVLFILEEKMGATRRTFLTDLARKKGFRVENELTDEVTHIVAENLSRSEVLAWLKEHKMEKTKQFELLDISWLIESMKVGKPVDTKGKYQLAESVEVSANPDPTEGRVNELPPTMKTVSPYACQRRTTLNNRNQRFTDSLEILRENYVLKGNDDTALEFRRAISVLKSLPFEVRSLKDTEGLPWISDEVKGIMEEIIEVGESREVQAVLNDEWYQSFHAFTRVFGVGVKTADKWYRMGLRTLEDVRSSKTLKLTPWQKVGLTYYEDLARGVTRAEADAIWLLVQDAVATFDPDAIVEIVGGQRRGKPQGHDVDLLISSPGAEKEQEDQLLQKVMNLWKKQGLLLCGRLEWSQWEWGVLPSGKADEGDAEASCFLILKLYDHLVRKSKRNMPTGSNMGESKPWKAIKVDLLRCPRGSFAFAMLQWTGSRMFRRDLRDYAREEKNMMLDNHSLYDMTRGIQLPAKSEEEIFEHLGLEYLEPFERNA

SEQ ID NO: 4949 - DNA, 1587 bp, synthetic construct
  misc_feature 1..1587: note = Variant of terminal deoxynucleotidyltransferase
  source 1..1587: mol_type = other DNA
atgcaccatcatcatcatcatggcggtagcggcagccacggcattcgtaccatcgattcggacttcgggaagaaacagcagaaaaaaggcgataaccacgatagttccgccacttatgaaatcaaatttcacgagtttgtgctgttcattctcgaagaaaaaatgggtgcgacgcgtcgtacttttctgacagatttagcccgcaagaaagggttccgcgtcgagaatgaactgaccgacgaagttacccacatcgtggcagaaaatctgtcacgctctgaagtattggcttggctgaaagaacacaagatggagaagaccaagcaattcgaactgctggatattagctggcttatcgaaagcatgaaagttggtaaaccggtggacaccaaggggaaataccagttggcggaatcggttgaggtgagtgcgaacccagatccgacagaaggtcgtgtaaacgagctgcctcctactatgaaaaccgtttctccgtatgcgtgtcaacgccgcaccaccctgaacaaccgtaatcaacgttttacggactcgctggagattcttcgcgaaaattacgtgctgaaaggcaacgacgatactgcgctggaatttcgtcgtgctatctccgtgctgaaaagccttccgtttgaggtacgtagcctgaaagacacggaaggattgccctggatcagtgatgaagtcaaagggattatggaagaaatcatcgaagtcggggagtcgcgtgaagtgcaggccgtgctcaatgatgagtggtatcaaagcttccacgcatttacgcgtgtctttggagtgggggtgaagacagcagacaagtggtaccgcatgggtctgcgcaccctcgaggatgttcgttccagcaagaccctgaagttgaccccgtggcagaaagtaggtctgacgtattatgaagatcttgctcgcggcgttacgcgtgcggaagctgacgcgatttggctgctggttcaggatgcagtcgcaactttcgacccggatgcgatcgtggagattgtcggtggacagcgtcgtgggaaacctcagggtcacgacgttgatctgcttatcagttctccgggagctgaaaaagagcaagaagaccaactcctgcagaaagtgatgaatctgtggaagaaacaagggttgttgctgtgtggtcgtctggaatggagtcagtgggaatgggggggtctgccgtccggtaaggctgatgagggtgacgcggaggcgtcgtgctttctgatcctcaaactttatgatcatctggtgcgtaaaagtaaacgcaatatgccgactggttcgaacatgggcgagtccaaaccgtggaaagcaattaaagtagatctgctgcgttgcccccgcagtagttttgcgtttgcgatgttgcagtggaccggaagccgcatgttccgtcgtgatctgcgcgattacgcccgcgaagagaagaacatgatgctggacaatcattcgctgtatgacatgactcgtggtatccaactccctgctaaatcggaagaggaaattttcgaacatctggggcttgaatacctggaaccgttcgaacgtaacgca

SEQ ID NO: 4950 - protein, 529 aa, synthetic construct
  REGION 1..529: note = Variant of terminal deoxynucleotidyltransferase
MHHHHHHGGSGSHGIRTIDSDFGKKQQKKGDNHDSSATYEIKFHEFVLFILEEKMGATRRTFLTDLARKKGFRVENELTDEVTHIVAENLSRSEVLAWLKEHKMEKTKQFELLDISWLIESMKVGKPVDTKGKYQLAESVEVSANPDPTEGRVNELPPTMKTVSPYACQRRTTLNNRNQRFTDSLEILRENYVLKGNDDTALEFRRAISVLKSLPFEVRSLKDTEGLPWISDEVKGIMEEIIEVGESREVQAVLNDEWYQSFHAFTRVFGVGVKTADKWYRMGLRTLEDVRSSKTLKLTPWQKVGLTYYEDLARGVTRAEADAIWLLVQDAVATFDPDAIVEIVGGQRRGKPQGHDVDLLISSPGAEKEQEDQLLQKVMNLWKKQGLLLCGRLEWSQWEWGGLPSGKADEGDAEASCFLILKLYDHLVRKSKRNMPTGSNMGESKPWKAIKVDLLRCPRSSFAFAMLQWTGSRMFRRDLRDYAREEKNMMLDNHSLYDMTRGIQLPAKSEEEIFEHLGLEYLEPFERNA

SEQ ID NO: 4951 - DNA, 1587 bp, synthetic construct
  misc_feature 1..1587: note = Variant of terminal deoxynucleotidyltransferase
  source 1..1587: mol_type = other DNA
atgcaccatcatcatcatcatggcggtagcggcagccacggcattcgtaccatcgattcggacttcgggaagaaacagcagaaaaaaggcgataaccacgatagttccgccacttatgaaatcaaatttcacgagtttgtgctgttcattctcgaagaaaaaatgggtgcgacgcgtcgtacttttctgacagatttagcccgcaagaaagggttccgcgtcgagaatgaactgaccgacgaagttacccacatcgtggcagaaaatctgtcacgctctgaagtattggcttggctgaaagaacacaagatggagaagaccaagcaattcgaactgctggatattagctggcttatcgaaagcatgaaagttggtaaaccggtggacaccaaggggaaataccagttggcggaatcggttgaggtgagtgcgaacccagatccgacagaaggtcgtgtaaacgagctgcctcctactatgaaaaccgtttctccgtatgcgtgtcaacgccgcaccaccctgaacaaccgtaatcaacgttttacggactcgctggagattcttcgcgaaaattacgtgctgaaaggcaacgacgatactgcgctggaatttcgtcgtgctatctccgtgctgaaaagccttccgtttgaggtacgtagcctgaaagacacggaaggattgccctggatcagtgatgaagtcaaagggattatggaagaaatcatcgaagtcggggagtcgcgtgaagtgcaggccgtgctcaatgatgagtggtatcaaagcttccacgcatttacgcgtgtctttggagtgggggtgaagacagcagacaagtggtaccgcatgggtctgcgcaccctcgaggatgttcgttccagcaagaccctgaagttgaccccgtggcagaaagtaggtctgacgtattatgaagatcttgctcgcggcgttacgcgtgcggaagctgacgcgatttggctgctggttcaggatgcagtcgcaactttcgacccggatgcgatcgtggagattgtcggtggacagcgtcgtgggaaacctcagggtcacgacgttgatctgcttatcagttctcagggagctgaaaaagagcaagaagaccaactcctgcagaaagtgatgaatctgtggaagaaacaagggttgttgctgtgtggtcgtctggaatggagtcagtgggaatgggggggtctgccgtccggtaaggctgatgagggtgacgcggaggcgtcgtgctttctgatcctcaaactttatgatcatctggtgcgtaaaagtaaacgcaatatgccgactggttcgaacatgggcgagtccaaaccgtggaaagcaattaaagtagatctgctgcgttgcccccgcggcagttttgcgtttgcgatgttgcagtggaccggaagccgcatgttccgtcgtgatctgcgcgattacgcccgcgaagagaagaacatgatgctggacaatcattcgctgtatgacatgactcgtggtatccaactccctgctaaatcggaagaggaaattttcgaacatctggggcttgaatacctggaaccgttcgaacgtaacgca

SEQ ID NO: 4952 - protein, 529 aa, synthetic construct
  REGION 1..529: note = Variant of terminal deoxynucleotidyltransferase
MHHHHHHGGSGSHGIRTIDSDFGKKQQKKGDNHDSSATYEIKFHEFVLFILEEKMGATRRTFLTDLARKKGFRVENELTDEVTHIVAENLSRSEVLAWLKEHKMEKTKQFELLDISWLIESMKVGKPVDTKGKYQLAESVEVSANPDPTEGRVNELPPTMKTVSPYACQRRTTLNNRNQRFTDSLEILRENYVLKGNDDTALEFRRAISVLKSLPFEVRSLKDTEGLPWISDEVKGIMEEIIEVGESREVQAVLNDEWYQSFHAFTRVFGVGVKTADKWYRMGLRTLEDVRSSKTLKLTPWQKVGLTYYEDLARGVTRAEADAIWLLVQDAVATFDPDAIVEIVGGQRRGKPQGHDVDLLISSQGAEKEQEDQLLQKVMNLWKKQGLLLCGRLEWSQWEWGGLPSGKADEGDAEASCFLILKLYDHLVRKSKRNMPTGSNMGESKPWKAIKVDLLRCPRGSFAFAMLQWTGSRMFRRDLRDYAREEKNMMLDNHSLYDMTRGIQLPAKSEEEIFEHLGLEYLEPFERNA

SEQ ID NO: 4953 - DNA, 1587 bp, synthetic construct
  misc_feature 1..1587: note = Variant of terminal deoxynucleotidyltransferase
  source 1..1587: mol_type = other DNA
atgcaccatcatcatcatcatggcggtagcggcagccacggcattcgtaccatcgattcggacttcgggaagaaacagcagaaaaaaggcgataaccacgatagttccgccacttatgaaatcaaatttcacgagtttgtgctgttcattctcgaagaaaaaatgggtgcgacgcgtcgtacttttctgacagatttagcccgcaagaaagggttccgcgtcgagaatgaactgaccgacgaagttacccacatcgtggcagaaaatctgtcacgctctgaagtattggcttggctgaaagaacacaagatggagaagaccaagcaattcgaactgctggatattagctggcttatcgaaagcatgaaagttggtaaaccggtggacaccaaggggaaataccagttggcggaatcggttgaggtgagtgcgaacccagatccgacagaaggtcgtgtaaacgagctgcctcctactatgaaaaccgtttctccgtatgcgtgtcaacgccgcaccaccctgaacaaccgtaatcaacgttttacggactcgctggagattcttcgcgaaaattacgtgctgaaaggcaacgacgatactgcgctggaatttcgtcgtgctatctccgtgctgaaaagccttccgtttgaggtacgtagcctgaaagacacggaaggattgccctggatcagtgatgaagtcaaagggattatggaagaaatcatcgaagtcggggagtcgcgtgaagtgcaggccgtgctcaatgatgagtggtatcaaagcttccacgcatttacgcgtgtctttggagtgggggtgaagacagcagacaagtggtaccgcatgggtctgcgcaccctcgaggatgttcgttccagcaagaccctgaagttgaccccgtggcagaaagtaggtctgacgtattatgaagatcttgctcgcggcgttacgcgtgcggaagctgacgcgatttggctgctggttcaggatgcagtcgcaactttcgacccggatgcgatcgtggagattgtcggtggacagcgtcgtgggaaacctcagggtcacgacgttgatctgcttatcagttctccgggagctgaaaaagagcaagaagaccaactcctgcagaaagtgatgaatctgtggaagaaacaagggttgttgctgtgtggtcgtctggaatggagtcagtgggaatgggggggtctgccgtccggtaaggctgatgagggtgacgcggaggcgtcgtgctttctgatcctcaaactttatgatcatctggtgcgtaaaagtaaacgcaatatgccgactggttcgaacatgggcgagtccaaaccgtggaaagcaattaaagtagatctgctgcgttgcccccgcggcagttttgcgtttgcgatgttgcagtggaccggaagccgcatgttccgtcgtgatctgcgcgattacgcccgcgaagagaagaacatgatgctggacaatcatcagctgtatgacatgactcgtggtatccaactccctgctaaatcggaagaggaaattttcgaacatctggggcttgaatacctggaaccgttcgaacgtaacgca

SEQ ID NO: 4954 - protein, 529 aa, synthetic construct
  REGION 1..529: note = Variant of terminal deoxynucleotidyltransferase
MHHHHHHGGSGSHGIRTIDSDFGKKQQKKGDNHDSSATYEIKFHEFVLFILEEKMGATRRTFLTDLARKKGFRVENELTDEVTHIVAENLSRSEVLAWLKEHKMEKTKQFELLDISWLIESMKVGKPVDTKGKYQLAESVEVSANPDPTEGRVNELPPTMKTVSPYACQRRTTLNNRNQRFTDSLEILRENYVLKGNDDTALEFRRAISVLKSLPFEVRSLKDTEGLPWISDEVKGIMEEIIEVGESREVQAVLNDEWYQSFHAFTRVFGVGVKTADKWYRMGLRTLEDVRSSKTLKLTPWQKVGLTYYEDLARGVTRAEADAIWLLVQDAVATFDPDAIVEIVGGQRRGKPQGHDVDLLISSPGAEKEQEDQLLQKVMNLWKKQGLLLCGRLEWSQWEWGGLPSGKADEGDAEASCFLILKLYDHLVRKSKRNMPTGSNMGESKPWKAIKVDLLRCPRGSFAFAMLQWTGSRMFRRDLRDYAREEKNMMLDNHQLYDMTRGIQLPAKSEEEIFEHLGLEYLEPFERNA

SEQ ID NO: 4955 - DNA, 1587 bp, synthetic construct
  misc_feature 1..1587: note = Variant of terminal deoxynucleotidyltransferase
  source 1..1587: mol_type = other DNA
atgcaccatcatcatcatcatggcggtagcggcagccacggcattcgtaccatcgattcggacttcgggaagaaacagcagaaaaaaggcgataaccacgatagttccgccacttatgaaatcaaatttcacgagtttgtgctgttcattctcgaagaaaaaatgggtgcgacgcgtcgtacttttctgacagatttagcccgcaagaaagggttccgcgtcgagaatgaactgaccgacgaagttacccacatcgtggcagaaaatctgtcacgctctgaagtattggcttggctgaaagaacacaagatggagaagaccaagcaattcgaactgctggatattagctggcttatcgaaagcatgaaagttggtaaaccggtggacaccaaggggaaataccagttggcggaatcggttgaggtgagtgcgaacccagatccgacagaaggtcgtgtaaacgagctgcctcctactatgaaaaccgtttctccgtatgcgtgtcaacgccgcaccaccctgaacaaccgtaatcaacgttttacggactcgctggagattcttcgcgaaaattacgtgctgaaaggcaacgacgatactgcgctggaatttcgtcgtgctatctccgtgctgaaaagccttccgtttgaggtacgtagcctgaaagacacggaaggattgccctggatcagtgatgaagtcaaagggattatggaagaaatcatcgaagtcggggagtcgcgtgaagtgcaggccgtgctcaatgatgagtggtatcaaagcttccacgcatttacgcgtgtctttggagtgggggtgaagacagcagacaagtggtaccgcatgggtctgcgcaccctcgaggatgttcgttccagcaagaccctgaagttgaccccgtggcagaaagtaggtctgacgtattatgaagatcttgctcgcggcgttacgcgtgcggaagctgacgcgatttggctgctggttcaggatgcagtcgcaactttcgacccggatgcgatcgtggagattgtcggtggacagcgtcgtgggaaacctcagggtcacgacgttgatctgcttatcagttctccgggagctgaaaaagagcaagaagaccaactcctgcagaaagtgatgaatctgtggaagaaacaagggttgttgctgtgtggtcgtctggaatggagtcagtgggaatgggggggtctgccgtccggtaaggctgatgagggtgacgcggaggcgtcgtgctttctgatcctcaaactttatgatcatctggtgcgtaaaagtaaacgcaatatgccgactggttcgaacatgggcgagtccaaaccgtggaaagcaattaaagtagatctgctgcgttgcccccgcgcgagttttgcgtttgcgatgttgcagtggaccggaagccgcatgttccgtcgtgatctgcgcgattacgcccgcgaagagaagaacatgatgctggacaatcattcgctgtatgacatgactcgtggtatccaactccctgctaaatcggaagaggaaattttcgaacatctggggcttgaatacctggaaccgttcgaacgtaacgca

SEQ ID NO: 4956 - protein, 529 aa, synthetic construct
  REGION 1..529: note = Variant of terminal deoxynucleotidyltransferase
MHHHHHHGGSGSHGIRTIDSDFGKKQQKKGDNHDSSATYEIKFHEFVLFILEEKMGATRRTFLTDLARKKGFRVENELTDEVTHIVAENLSRSEVLAWLKEHKMEKTKQFELLDISWLIESMKVGKPVDTKGKYQLAESVEVSANPDPTEGRVNELPPTMKTVSPYACQRRTTLNNRNQRFTDSLEILRENYVLKGNDDTALEFRRAISVLKSLPFEVRSLKDTEGLPWISDEVKGIMEEIIEVGESREVQAVLNDEWYQSFHAFTRVFGVGVKTADKWYRMGLRTLEDVRSSKTLKLTPWQKVGLTYYEDLARGVTRAEADAIWLLVQDAVATFDPDAIVEIVGGQRRGKPQGHDVDLLISSPGAEKEQEDQLLQKVMNLWKKQGLLLCGRLEWSQWEWGGLPSGKADEGDAEASCFLILKLYDHLVRKSKRNMPTGSNMGESKPWKAIKVDLLRCPRASFAFAMLQWTGSRMFRRDLRDYAREEKNMMLDNHSLYDMTRGIQLPAKSEEEIFEHLGLEYLEPFERNA

SEQ ID NO: 4957 - DNA, 1587 bp, synthetic construct
  misc_feature 1..1587: note = Variant of terminal deoxynucleotidyltransferase
  source 1..1587: mol_type = other DNA
atgcaccatcatcatcatcatggcggtagcggcagccacggcattcgtaccatcgattcggacttcgggaagaaacagcagaaaaaaggcgataaccacgatagttccgccacttatgaaatcaaatttcacgagtttgtgctgttcattctcgaagaaaaaatgggtgcgacgcgtcgtacttttctgacagatttagcccgcaagaaagggttccgcgtcgagaatgaactgaccgacgaagttacccacatcgtggcagaaaatctgtcacgctctgaagtattggcttggctgaaagaacacaagatggagaagaccaagcaattcgaactgctggatattagctggcttatcgaaagcatgaaagttggtaaaccggtggacaccaaggggaaataccagttggcggaatcggttgaggtgagtgcgaacccagatccgacagaaggtcgtgtaaacgagctgcctcctactatgaaaaccgtttctccgtatgcgtgtcaacgccgcaccaccctgaacaaccgtaatcaacgttttacggactcgctggagattcttcgcgaaaattacgtgctgaaaggcaacgacgatactgcgctggaatttcgtcgtgctatctccgtgctgaaaagccttccgtttgaggtacgtagcctgaaagacacggaaggattgccctggatcagtgatgaagtcaaagggattatggaagaaatcatcgaagtcggggagtcgcgtgaagtgcaggccgtgctcaatgatgagtggtatcaaagcttccacgcatttacgcgtgtctttggagtgggggtgaagacagcagacaagtggtaccgcatgggtctgcgcaccctcgaggatgttcgttccagcaagaccctgaagttgaccccgtggcagaaagtaggtctgacgtattatgaagatcttgctcgcggcgttacgcgtgcggaagctgacgcgatttggctgctggttcaggatgcagtcgcaactttcgacccggatgcgatcgtggagattgtcggtggacagcgtcgtgggaaacctcagggtcacgacgttgatctgcttatcagttctccgggagctgaaaaagagcaagaagaccaactcctgcagaaagtgatgaatctgtggaagaaacaagggttgttgctgtgtggtcgtctggaatggagtcagtgggaatgggggggtctgccgtccggtaaggctgatgagggtatggcggaggcgtcgtgctttctgatcctcaaactttatgatcatctggtgcgtaaaagtaaacgcaatatgccgactggttcgaacatgggcgagtccaaaccgtggaaagcaattaaagtagatctgctgcgttgcccccgcggcagttttgcgtttgcgatgttgcagtggaccggaagccgcatgttccgtcgtgatctgcgcgattacgcccgcgaagagaagaacatgatgctggacaatcattcgctgtatgacatgactcgtggtatccaactccctgctaaatcggaagaggaaattttcgaacatctggggcttgaatacctggaaccgttcgaacgtaacgca

SEQ ID NO: 4958 - protein, 529 aa, synthetic construct
  REGION 1..529: note = Variant of terminal deoxynucleotidyltransferase
MHHHHHHGGSGSHGIRTIDSDFGKKQQKKGDNHDSSATYEIKFHEFVLFILEEKMGATRRTFLTDLARKKGFRVENELTDEVTHIVAENLSRSEVLAWLKEHKMEKTKQFELLDISWLIESMKVGKPVDTKGKYQLAESVEVSANPDPTEGRVNELPPTMKTVSPYACQRRTTLNNRNQRFTDSLEILRENYVLKGNDDTALEFRRAISVLKSLPFEVRSLKDTEGLPWISDEVKGIMEEIIEVGESREVQAVLNDEWYQSFHAFTRVFGVGVKTADKWYRMGLRTLEDVRSSKTLKLTPWQKVGLTYYEDLARGVTRAEADAIWLLVQDAVATFDPDAIVEIVGGQRRGKPQGHDVDLLISSPGAEKEQEDQLLQKVMNLWKKQGLLLCGRLEWSQWEWGGLPSGKADEGMAEASCFLILKLYDHLVRKSKRNMPTGSNMGESKPWKAIKVDLLRCPRGSFAFAMLQWTGSRMFRRDLRDYAREEKNMMLDNHSLYDMTRGIQLPAKSEEEIFEHLGLEYLEPFERNA

SEQ ID NO: 4959 - DNA, 1587 bp, synthetic construct
  misc_feature 1..1587: note = Variant of terminal deoxynucleotidyltransferase
  source 1..1587: mol_type = other DNA
atgcaccatcatcatcatcatggcggtagcggcagccacggcattcgtaccatcgattcggacttcgggaagaaacagcagaaaaaaggcgataaccacgatagttccgccacttatgaaatcaaatttcacgagtttgtgctgttcattctcgaagaaaaaatgggtgcgacgcgtcgtacttttctgacagatttagcccgcaagaaagggttccgcgtcgagaatgaactgaccgacgaagttacccacatcgtggcagaaaatctgtcacgctctgaagtattggcttggctgaaagaacacaagatggagaagaccaagcaattcgaactgctggatattagctggcttatcgaaagcatgaaagttggtaaaccggtggacaccaaggggaaataccagttggcggaatcggttgaggtgagtgcgaacccagatccgacagaaggtcgtgtaaacgagctgcctcctactatgaaaaccgtttctccgtatgcgtgtcaacgccgcaccaccctgaacaaccgtaatcaacgttttacggactcgctggagattcttcgcgaaaattacgtgctgaaaggcaacgacgatactgcgctggaatttcgtcgtgctatctccgtgctgaaaagccttccgtttgaggtacgtagcctgaaagacacggaaggattgccctggatcagtgatgaagtcaaagggattatggaagaaatcatcgaagtcggggagtcgcgtgaagtgcaggccgtgctcaatgatgagtggtatcaaagcttccacgcatttacgcgtgtctttggagtgggggtgaagacagcagacaagtggtaccgcatgggtctgcgcaccctcgaggatgttcgttccagcaagaccctgaagttgaccccgtggcagaaagtaggtctgacgtattatgaagatcttgctcgcggcgttacgcgtgcggaagctgacgcgatttggctgctggttcaggatgcagtcgcaactttcgacccggatgcgatcgtggagattgtcggtggacagcgtcgtgggaaacctcagggtcacgacgttgatctgcttatcagttctccgggagctgaaaaagagcaagaagaccaactcctgcagaaagtgatgaatctgtggaagaaacaagggttgttgctgtgtggtggtctggaatggagtcagtgggaatgggggggtctgccgtccggtaaggctgatgagggtgacgcggaggcgtcgtgctttctgatcctcaaactttatgatcatctggtgcgtaaaagtaaacgcaatatgccgactggttcgaacatgggcgagtccaaaccgtggaaagcaattaaagtagatctgctgcgttgcccccgcggcagttttgcgtttgcgatgttgcagtggaccggaagccgcatgttccgtcgtgatctgcgcgattacgcccgcgaagagaagaacatgatgctggacaatcattcgctgtatgacatgactcgtggtatccaactccctgctaaatcggaagaggaaattttcgaacatctggggcttgaatacctggaaccgttcgaacgtaacgca

SEQ ID NO: 4960 - protein, 529 aa, synthetic construct
  REGION 1..529: note = Variant of terminal deoxynucleotidyltransferase
MHHHHHHGGSGSHGIRTIDSDFGKKQQKKGDNHDSSATYEIKFHEFVLFILEEKMGATRRTFLTDLARKKGFRVENELTDEVTHIVAENLSRSEVLAWLKEHKMEKTKQFELLDISWLIESMKVGKPVDTKGKYQLAESVEVSANPDPTEGRVNELPPTMKTVSPYACQRRTTLNNRNQRFTDSLEILRENYVLKGNDDTALEFRRAISVLKSLPFEVRSLKDTEGLPWISDEVKGIMEEIIEVGESREVQAVLNDEWYQSFHAFTRVFGVGVKTADKWYRMGLRTLEDVRSSKTLKLTPWQKVGLTYYEDLARGVTRAEADAIWLLVQDAVATFDPDAIVEIVGGQRRGKPQGHDVDLLISSPGAEKEQEDQLLQKVMNLWKKQGLLLCGGLEWSQWEWGGLPSGKADEGDAEASCFLILKLYDHLVRKSKRNMPTGSNMGESKPWKAIKVDLLRCPRGSFAFAMLQWTGSRMFRRDLRDYAREEKNMMLDNHSLYDMTRGIQLPAKSEEEIFEHLGLEYLEPFERNA

SEQ ID NO: 4961 - DNA, 1587 bp, synthetic construct
  misc_feature 1..1587: note = Variant of terminal deoxynucleotidyltransferase
  source 1..1587: mol_type = other DNA
atgcaccatcatcatcatcatggcggtagcggcagccacggcattcgtaccatcgattcggacttcgggaagaaacagcagaaaaaaggcgataaccacgatagttccgccacttatgaaatcaaatttcacgagtttgtgctgttcattctcgaagaaaaaatgggtgcgacgcgtcgtacttttctgacagatttagcccgcaagaaagggttccgcgtcgagaatgaactgaccgacgaagttacccacatcgtggcagaaaatctgtcacgctctgaagtattggcttggctgaaagaacacaagatggagaagaccaagcaattcgaactgctggatattagctggcttatcgaaagcatgaaagttggtaaaccggtggacaccaaggggaaataccagttggcggaatcggttgaggtgagtgcgaacccagatccgacagaaggtcgtgtaaacgagctgcctcctactatgaaaaccgtttctccgtatgcgtgtcaacgccgcaccaccctgaacaaccgtaatcaacgttttacggactcgctggagattcttcgcgaaaattacgtgctgaaaggcaacgacgatactgcgctggaatttcgtcgtgctatctccgtgctgaaaagccttccgtttgaggtacgtagcctgaaagacacggaaggattgccctggatcagtgatgaagtcaaagggattatggaagaaatcatcgaagtcggggagtcgcgtgaagtgcaggccgtgctcaatgatgagtggtatcaaagcttccacgcatttacgcgtgtctttggagtgggggtgaagacagcagacaagtggtaccgcatgggtctgcgcaccctcgaggatgttcgttccagcaagaccctgaagttgaccccgtggcagaaagtaggtctgacgtattatgaagatcttgctcgcggcgttacgcgtgcggaagctgacgcgatttggctgctggttcaggatgcagtcgcaactttcgacccggatgcgatcgtggagattgtcggtggacagcgtcgtgggaaacctcagggtcacgacgttgatctgcttatcagttctccgggagctgaaaaagagcaagaagaccaactcctgcagaaagtgatgaatctgtggaagaaacaagggttgttgctgtgtggtcgtctggaatggagtcagtgggaatgggggggtctgccgtccggtaaggctgatgagggtgacgcggaggcgtcgtgctttctgatcctcaaactttatgatcatctggtgcgtaaaagtaaacgcaatatgccgactggttcgaacatgggcgagtccaaaccgtggaaagcaattaaagtagatctgctgcgttgcccccgcggcagttttgcgtttgcgatgttgcagtggaccggaagccgcatgttccgtcgtgatctgcgcgattacgcccgcgaagttaagaacatgatgctggacaatcattcgctgtatgacatgactcgtggtatccaactccctgctaaatcggaagaggaaattttcgaacatctggggcttgaatacctggaaccgttcgaacgtaacgca

SEQ ID NO: 4962 - protein, 529 aa, synthetic construct
  REGION 1..529: note = Variant of terminal deoxynucleotidyltransferase
MHHHHHHGGSGSHGIRTIDSDFGKKQQKKGDNHDSSATYEIKFHEFVLFILEEKMGATRRTFLTDLARKKGFRVENELTDEVTHIVAENLSRSEVLAWLKEHKMEKTKQFELLDISWLIESMKVGKPVDTKGKYQLAESVEVSANPDPTEGRVNELPPTMKTVSPYACQRRTTLNNRNQRFTDSLEILRENYVLKGNDDTALEFRRAISVLKSLPFEVRSLKDTEGLPWISDEVKGIMEEIIEVGESREVQAVLNDEWYQSFHAFTRVFGVGVKTADKWYRMGLRTLEDVRSSKTLKLTPWQKVGLTYYEDLARGVTRAEADAIWLLVQDAVATFDPDAIVEIVGGQRRGKPQGHDVDLLISSPGAEKEQEDQLLQKVMNLWKKQGLLLCGRLEWSQWEWGGLPSGKADEGDAEASCFLILKLYDHLVRKSKRNMPTGSNMGESKPWKAIKVDLLRCPRGSFAFAMLQWTGSRMFRRDLRDYAREVKNMMLDNHSLYDMTRGIQLPAKSEEEIFEHLGLEYLEPFERNA

SEQ ID NO: 4963 - DNA, 1587 bp, synthetic construct
  misc_feature 1..1587: note = Variant of terminal deoxynucleotidyltransferase
  source 1..1587: mol_type = other DNA
atgcaccatcatcatcatcatggcggtagcggcagccacggcattcgtaccatcgattcggacttcgggaagaaacagcagaaaaaaggcgataaccacgatagttccgccacttatgaaatcaaatttcacgagtttgtgctgttcattctcgaagaaaaaatgggtgcgacgcgtcgtacttttctgacagatttagcccgcaagaaagggttccgcgtcgagaatgaactgaccgacgaagttacccacatcgtggcagaaaatctgtcacgctctgaagtattggcttggctgaaagaacacaagatggagaagaccaagcaattcgaactgctggatattagctggcttatcgaaagcatgaaagttggtaaaccggtggacaccaaggggaaataccagttggcggaatcggttgaggtgagtgcgaacccagatccgacagaaggtcgtgtaaacgagctgcctcctactatgaaaaccgtttctccgtatgcgtgtcaacgccgcaccaccctgaacaaccgtaatcaacgttttacggactcgctggagattcttcgcgaaaattacgtgctgaaaggcaacgacgatactgcgctggaatttcgtcgtgctatctccgtgctgaaaagccttccgtttgaggtacgtagcctgaaagacacggaaggattgccctggatcagtgatgaagtcaaagggattatggaagaaatcatcgaagtcggggagtcgcgtgaagtgcaggccgtgctcaatgatgagtggtatcaaagcttccacgcatttacgcgtgtctttggagtgggggtgaagacagcagacaagtggtaccgcatgggtctgcgcaccctcgaggatgttcgttccagcaagaccctgaagttgaccccgtggcagaaagtaggtctgacgtattatgaagatcttgctcgcggcgttacgcgtgcggaagctgacgcgatttggctgctggttcaggatgcagtcgcaactttcgacccggatgcgatcgtggagattgtcggtggacagcgtcgtgggaaacctcagggtcacgacgttgatctgcttatcagttctccgggagctgaaaaagagcaagaagaccaactcctgcagaaagtgatgaatctgtggaagaaacaagggttgttgctgtgtggtcgtctggaatggagtcagtgggaatgggggggtctgccgtccggtaaggctgatgagggtgacgcggaggcgtcgtgctttctgatcctcaaactttatgatcatctggtgcgtaaaagtaaacgcaatatgccgactggttcgaacatgggcgagtccaaaccgtggaaagcaattaaagtagatctgctgcgttgcccccgcccgagttttgcgtttgcgatgttgcagtggaccggaagccgcatgttccgtcgtgatctgcgcgattacgcccgcgaagagaagaacatgatgctggacaatcattcgctgtatgacatgactcgtggtatccaactccctgctaaatcggaagaggaaattttcgaacatctggggcttgaatacctggaaccgttcgaacgtaacgca

SEQ ID NO: 4964 - protein, 529 aa, synthetic construct
  REGION 1..529: note = Variant of terminal deoxynucleotidyltransferase
MHHHHHHGGSGSHGIRTIDSDFGKKQQKKGDNHDSSATYEIKFHEFVLFILEEKMGATRRTFLTDLARKKGFRVENELTDEVTHIVAENLSRSEVLAWLKEHKMEKTKQFELLDISWLIESMKVGKPVDTKGKYQLAESVEVSANPDPTEGRVNELPPTMKTVSPYACQRRTTLNNRNQRFTDSLEILRENYVLKGNDDTALEFRRAISVLKSLPFEVRSLKDTEGLPWISDEVKGIMEEIIEVGESREVQAVLNDEWYQSFHAFTRVFGVGVKTADKWYRMGLRTLEDVRSSKTLKLTPWQKVGLTYYEDLARGVTRAEADAIWLLVQDAVATFDPDAIVEIVGGQRRGKPQGHDVDLLISSPGAEKEQEDQLLQKVMNLWKKQGLLLCGRLEWSQWEWGGLPSGKADEGDAEASCFLILKLYDHLVRKSKRNMPTGSNMGESKPWKAIKVDLLRCPRPSFAFAMLQWTGSRMFRRDLRDYAREEKNMMLDNHSLYDMTRGIQLPAKSEEEIFEHLGLEYLEPFERNA

SEQ ID NO: 4965 - DNA, 1587 bp, synthetic construct
  misc_feature 1..1587: note = Variant of terminal deoxynucleotidyltransferase
  source 1..1587: mol_type = other DNA
atgcaccatcatcatcatcatggcggtagcggcagccacggcattcgtaccatcgattcggacttcgggaagaaacagcagaaaaaaggcgataaccacgatagttccgccacttatgaaatcaaatttcacgagtttgtgctgttcattctcgaagaaaaaatgggtgcgacgcgtcgtacttttctgacagatttagcccgcaagaaagggttccgcgtcgagaatgaactgaccgacgaagttacccacatcgtggcagaaaatctgtcacgctctgaagtattggcttggctgaaagaacacaagatggagaagaccaagcaattcgaactgctggatattagctggcttatcgaaagcatgaaagttggtaaaccggtggacaccaaggggaaataccagttggcggaatcggttgaggtgagtgcgaacccagatccgacagaaggtcgtgtaaacgagctgcctcctactatgaaaaccgtttctccgtatgcgtgtcaacgccgcaccaccctgaacaaccgtaatcaacgttttacggactcgctggagattcttcgcgaaaattacgtgctgaaaggcaacgacgatactgcgctggaatttcgtcgtgctatctccgtgctgaaaagccttccgtttgaggtacgtagcctgaaagacacggaaggattgccctggatcagtgatgaagtcaaagggattatggaagaaatcatcgaagtcggggagtcgcgtgaagtgcaggccgtgctcaatgatgagtggtatcaaagcttccacgcatttacgcgtacttttggagtgggggtgaagacagcagacaagtggtaccgcatgggtctgcgcaccctcgaggatgttcgttccagcaagaccctgaagttgaccccgtggcagaaagtaggtctgacgtattatgaagatcttgctcgcggcgttacgcgtgcggaagctgacgcgatttggctgctggttcaggatgcagtcgcaactttcgacccggatgcgatcgtggagattgtcggtggacagcgtcgtgggaaacctcagggtcacgacgttgatctgcttatcagttctccgggagctgaaaaagagcaagaagaccaactcctgcagaaagtgatgaatctgtggaagaaacaagggttgttgctgtgtggtcgtctggaatggagtcagtgggaatgggggggtctgccgtccggtaaggctgatgagggtgacgcggaggcgtcgtgctttctgatcctcaaactttatgatcatctggtgcgtaaaagtaaacgcaatatgccgactggttcgaacatgggcgagtccaaaccgtggaaagcaattaaagtagatctgctgcgttgcccccgcggcagttttgcgtttgcgatgttgcagtggaccggaagccgcatgttccgtcgtgatctgcgcgattacgcccgcgaagagaagaacatgatgctggacaatcattcgctgtatgacatgactcgtggtatccaactccctgctaaatcggaagaggaaattttcgaacatctggggcttgaatacctggaaccgttcgaacgtaacgca

SEQ ID NO: 4966 - protein, 529 aa, synthetic construct
  REGION 1..529: note = Variant of terminal deoxynucleotidyltransferase
MHHHHHHGGSGSHGIRTIDSDFGKKQQKKGDNHDSSATYEIKFHEFVLFILEEKMGATRRTFLTDLARKKGFRVENELTDEVTHIVAENLSRSEVLAWLKEHKMEKTKQFELLDISWLIESMKVGKPVDTKGKYQLAESVEVSANPDPTEGRVNELPPTMKTVSPYACQRRTTLNNRNQRFTDSLEILRENYVLKGNDDTALEFRRAISVLKSLPFEVRSLKDTEGLPWISDEVKGIMEEIIEVGESREVQAVLNDEWYQSFHAFTRTFGVGVKTADKWYRMGLRTLEDVRSSKTLKLTPWQKVGLTYYEDLARGVTRAEADAIWLLVQDAVATFDPDAIVEIVGGQRRGKPQGHDVDLLISSPGAEKEQEDQLLQKVMNLWKKQGLLLCGRLEWSQWEWGGLPSGKADEGDAEASCFLILKLYDHLVRKSKRNMPTGSNMGESKPWKAIKVDLLRCPRGSFAFAMLQWTGSRMFRRDLRDYAREEKNMMLDNHSLYDMTRGIQLPAKSEEEIFEHLGLEYLEPFERNA

SEQ ID NO: 4967 - DNA, 1587 bp, synthetic construct
  misc_feature 1..1587: note = Variant of terminal deoxynucleotidyltransferase
  source 1..1587: mol_type = other DNA
atgcaccatcatcatcatcatggcggtagcggcagccacggcattcgtaccatcgattcggacttcgggaagaaacagcagaaaaaaggcgataaccacgatagttccgccacttatgaaatcaaatttcacgagtttgtgctgttcattctcgaagaaaaaatgggtgcgacgcgtcgtacttttctgacagatttagcccgcaagaaagggttccgcgtcgagaatgaactgaccgacgaagttacccacatcgtggcagaaaatctgtcacgctctgaagtattggcttggctgaaagaacacaagatggagaagaccaagcaattcgaactgctggatattagctggcttatcgaaagcatgaaagttggtaaaccggtggacaccaaggggaaataccagttggcggaatcggttgaggtgagtgcgaacccagatccgacagaaggtcgtgtaaacgagctgcctcctactatgaaaaccgtttctccgtatgcgtgtcaacgccgcaccaccctgaacaaccgtaatcaacgttttacggactcgctggagattcttcgcgaaaattacgtgctgaaaggcaacgacgatactgcgctggaatttcgtcgtgctatctccgtgctgaaaagccttccgtttgaggtacgtagcctgaaagacacggaaggattgccctggatcagtgatgaagtcaaagggattatggaagaaatcatcgaagtcggggagtcgcgtgaagtgcaggccgtgctcaatgatgagtggtatcaaagcttccacgcatttacgcgtgtctttggagtgggggtgaagacagcagacaagtggtaccgcatgggtctgcgcaccctcgaggatgttcgttccagcaagaccctgaagttgaccccgtggcagaaagtaggtctgacgtattatgaagatcttgctcgcggcgttacgcgtgcggaagctgacgcgatttggctgctggttcaggatgcagtcgcaactttcgacccggatgcgatcgtggagattgtcggtggacagcgtcgtgggaaacctcagggtcacgacgttgatctgcttatcgtgtctccgggagctgaaaaagagcaagaagaccaactcctgcagaaagtgatgaatctgtggaagaaacaagggttgttgctgtgtggtcgtctggaatggagtcagtgggaatgggggggtctgccgtccggtaaggctgatgagggtgacgcggaggcgtcgtgctttctgatcctcaaactttatgatcatctggtgcgtaaaagtaaacgcaatatgccgactggttcgaacatgggcgagtccaaaccgtggaaagcaattaaagtagatctgctgcgttgcccccgcggcagttttgcgtttgcgatgttgcagtggaccggaagccgcatgttccgtcgtgatctgcgcgattacgcccgcgaagagaagaacatgatgctggacaatcattcgctgtatgacatgactcgtggtatccaactccctgctaaatcggaagaggaaattttcgaacatctggggcttgaatacctggaaccgttcgaacgtaacgca

SEQ ID NO: 4968 - protein, 529 aa, synthetic construct
  REGION 1..529: note = Variant of terminal deoxynucleotidyltransferase
MHHHHHHGGSGSHGIRTIDSDFGKKQQKKGDNHDSSATYEIKFHEFVLFILEEKMGATRRTFLTDLARKKGFRVENELTDEVTHIVAENLSRSEVLAWLKEHKMEKTKQFELLDISWLIESMKVGKPVDTKGKYQLAESVEVSANPDPTEGRVNELPPTMKTVSPYACQRRTTLNNRNQRFTDSLEILRENYVLKGNDDTALEFRRAISVLKSLPFEVRSLKDTEGLPWISDEVKGIMEEIIEVGESREVQAVLNDEWYQSFHAFTRVFGVGVKTADKWYRMGLRTLEDVRSSKTLKLTPWQKVGLTYYEDLARGVTRAEADAIWLLVQDAVATFDPDAIVEIVGGQRRGKPQGHDVDLLIVSPGAEKEQEDQLLQKVMNLWKKQGLLLCGRLEWSQWEWGGLPSGKADEGDAEASCFLILKLYDHLVRKSKRNMPTGSNMGESKPWKAIKVDLLRCPRGSFAFAMLQWTGSRMFRRDLRDYAREEKNMMLDNHSLYDMTRGIQLPAKSEEEIFEHLGLEYLEPFERNA

SEQ ID NO: 4969 - DNA, 1587 bp, synthetic construct
  misc_feature 1..1587: note = Variant of terminal deoxynucleotidyltransferase
  source 1..1587: mol_type = other DNA
atgcaccatcatcatcatcatggcggtagcggcagccacggcattcgtaccatcgattcggacttcgggaagaaacagcagaaaaaaggcgataaccacgatagttccgccacttatgaaatcaaatttcacgagtttgtgctgttcattctcgaagaaaaaatgggtgcgacgcgtcgtacttttctgacagatttagcccgcaagaaagggttccgcgtcgagaatgaactgaccgacgaagttacccacatcgtggcagaaaatctgtcacgctctgaagtattggcttggctgaaagaacacaagatggagaagaccaagcaattcgaactgctggatattagctggcttatcgaaagcatgaaagttggtaaaccggtggacaccaaggggaaataccagttggcggaatcggttgaggtgagtgcgaacccagatccgacagaaggtcgtgtaaacgagctgcctcctactatgaaaaccgtttctccgtatgcgtgtcaacgccgcaccaccctgaacaaccgtaatcaacgttttacggactcgctggagattcttcgcgaaaattacgtgctgaaaggcaacgacgatactgcgctggaatttcgtcgtgctatctccgtgctgaaaagccttccgtttgaggtacgtagcctgaaagacacggaaggattgccctggatcagtgatgaagtcaaagggattatggaagaaatcatcgaagtcggggagtcgcgtgaagtgcaggccgtgctcaatgatgagtggtataggagcttccacgcatttacgcgtgtctttggagtgggggtgaagacagcagacaagtggtaccgcatgggtctgcgcaccctcgaggatgttcgttccagcaagaccctgaagttgaccccgtggcagaaagtaggtctgacgtattatgaagatcttgctcgcggcgttacgcgtgcggaagctgacgcgatttggctgctggttcaggatgcagtcgcaactttcgacccggatgcgatcgtggagattgtcggtggacagcgtcgtgggaaacctcagggtcacgacgttgatctgcttatcagttctccgggagctgaaaaagagcaagaagaccaactcctgcagaaagtgatgaatctgtggaagaaacaagggttgttgctgtgtggtcgtctggaatggagtcagtgggaatgggggggtctgccgtccggtaaggctgatgagggtgacgcggaggcgtcgtgctttctgatcctcaaactttatgatcatctggtgcgtaaaagtaaacgcaatatgccgactggttcgaacatgggcgagtccaaaccgtggaaagcaattaaagtagatctgctgcgttgcccccgcggcagttttgcgtttgcgatgttgcagtggaccggaagccgcatgttccgtcgtgatctgcgcgattacgcccgcgaagagaagaacatgatgctggacaatcattcgctgtatgacatgactcgtggtatccaactccctgctaaatcggaagaggaaattttcgaacatctggggcttgaatacctggaaccgttcgaacgtaacgca

SEQ ID NO: 4970 - protein, 529 aa, synthetic construct
  REGION 1..529: note = Variant of terminal deoxynucleotidyltransferase
MHHHHHHGGSGSHGIRTIDSDFGKKQQKKGDNHDSSATYEIKFHEFVLFILEEKMGATRRTFLTDLARKKGFRVENELTDEVTHIVAENLSRSEVLAWLKEHKMEKTKQFELLDISWLIESMKVGKPVDTKGKYQLAESVEVSANPDPTEGRVNELPPTMKTVSPYACQRRTTLNNRNQRFTDSLEILRENYVLKGNDDTALEFRRAISVLKSLPFEVRSLKDTEGLPWISDEVKGIMEEIIEVGESREVQAVLNDEWYRSFHAFTRVFGVGVKTADKWYRMGLRTLEDVRSSKTLKLTPWQKVGLTYYEDLARGVTRAEADAIWLLVQDAVATFDPDAIVEIVGGQRRGKPQGHDVDLLISSPGAEKEQEDQLLQKVMNLWKKQGLLLCGRLEWSQWEWGGLPSGKADEGDAEASCFLILKLYDHLVRKSKRNMPTGSNMGESKPWKAIKVDLLRCPRGSFAFAMLQWTGSRMFRRDLRDYAREEKNMMLDNHSLYDMTRGIQLPAKSEEEIFEHLGLEYLEPFERNA

SEQ ID NO: 4971 - DNA, 1587 bp, synthetic construct
  misc_feature 1..1587: note = Variant of terminal deoxynucleotidyltransferase
  source 1..1587: mol_type = other DNA
atgcaccatcatcatcatcatggcggtagcggcagccacggcattcgtaccatcgattcggacttcgggaagaaacagcagaaaaaaggcgataaccacgatagttccgccacttatgaaatcaaatttcacgagtttgtgctgttcattctcgaagaaaaaatgggtgcgacgcgtcgtacttttctgacagatttagcccgcaagaaagggttccgcgtcgagaatgaactgaccgacgaagttacccacatcgtggcagaaaatctgtcacgctctgaagtattggcttggctgaaagaacacaagatggagaagaccaagcaattcgaactgctggatattagctggcttatcgaaagcatgaaagttggtaaaccggtggacaccaaggggaaataccagttggcggaatcggttgaggtgagtgcgaacccagatccgacagaaggtcgtgtaaacgagctgcctcctactatgaaaaccgtttctccgtatgcgtgtcaacgccgcaccaccctgaacaaccgtaatcaacgttttacggactcgctggagattcttcgcgaaaattacgtgctgaaaggcaacgacgatactgcgctggaatttcgtcgtgctatctccgtgctgaaaagccttccgtttgaggtacgtagcctgaaagacacggaaggattgccctggatcagtgatgaagtcaaagggattatggaagaaatcatcgaagtcggggagtcgcgtgaagtgcaggccgtgctcaatgatgagtggtatcaaagcttccacgcatttacgcgtgtctttggagtgggggtgaagacagcagacaagtggtaccgcatgggtctgcgcaccctcgaggatgttcgttccagcaagaccctgaagttgaccccgtggcagaaagtaggtctgacgtattatgaagatcttgctcgcggcgttacgcgtgcggaagctgacgcgatttggctgctggttcaggatgcagtcgcaactttcgacccggatgcgatcgtggagattgtcggtggacagcgtcgtgggaaacctcagggtcacgacgttgatctgcttatcagttctccgggagctgaaaaagagcaagaagaccaactcctgcagaaagtgatgaatctgtggaagaaacaagggttgttgctgtgtggtcgtctggaatggagtcagtgggaatgggggggtctgccgtccggtaaggctgatgagggtggtgcggaggcgtcgtgctttctgatcctcaaactttatgatcatctggtgcgtaaaagtaaacgcaatatgccgactggttcgaacatgggcgagtccaaaccgtggaaagcaattaaagtagatctgctgcgttgcccccgcggcagttttgcgtttgcgatgttgcagtggaccggaagccgcatgttccgtcgtgatctgcgcgattacgcccgcgaagagaagaacatgatgctggacaatcattcgctgtatgacatgactcgtggtatccaactccctgctaaatcggaagaggaaattttcgaacatctggggcttgaatacctggaaccgttcgaacgtaacgca

SEQ ID NO: 4972 - protein, 529 aa, synthetic construct
  REGION 1..529: note = Variant of terminal deoxynucleotidyltransferase
MHHHHHHGGSGSHGIRTIDSDFGKKQQKKGDNHDSSATYEIKFHEFVLFILEEKMGATRRTFLTDLARKKGFRVENELTDEVTHIVAENLSRSEVLAWLKEHKMEKTKQFELLDISWLIESMKVGKPVDTKGKYQLAESVEVSANPDPTEGRVNELPPTMKTVSPYACQRRTTLNNRNQRFTDSLEILRENYVLKGNDDTALEFRRAISVLKSLPFEVRSLKDTEGLPWISDEVKGIMEEIIEVGESREVQAVLNDEWYQSFHAFTRVFGVGVKTADKWYRMGLRTLEDVRSSKTLKLTPWQKVGLTYYEDLARGVTRAEADAIWLLVQDAVATFDPDAIVEIVGGQRRGKPQGHDVDLLISSPGAEKEQEDQLLQKVMNLWKKQGLLLCGRLEWSQWEWGGLPSGKADEGGAEASCFLILKLYDHLVRKSKRNMPTGSNMGESKPWKAIKVDLLRCPRGSFAFAMLQWTGSRMFRRDLRDYAREEKNMMLDNHSLYDMTRGIQLPAKSEEEIFEHLGLEYLEPFERNA

SEQ ID NO: 4973 - DNA, 1587 bp, synthetic construct
  misc_feature 1..1587: note = Variant of terminal deoxynucleotidyltransferase
  source 1..1587: mol_type = other DNA
atgcaccatcatcatcatcatggcggtagcggcagccacggcattcgtaccatcgattcggacttcgggaagaaacagcagaaaaaaggcgataaccacgatagttccgccacttatgaaatcaaatttcacgagtttgtgctgttcattctcgaagaaaaaatgggtgcgacgcgtcgtacttttctgacagatttagcccgcaagaaagggttccgcgtcgagaatgaactgaccgacgaagttacccacatcgtggcagaaaatctgtcacgctctgaagtattggcttggctgaaagaacacaagatggagaagaccaagcaattcgaactgctggatattagctggcttatcgaaagcatgaaagttggtaaaccggtggacaccaaggggaaataccagttggcggaatcggttgaggtgagtgcgaacccagatccgacagaaggtcgtgtaaacgagctgcctcctactatgaaaaccgtttctccgtatgcgtgtcaacgccgcaccaccctgaacaaccgtaatcaacgttttacggactcgctggagattcttcgcgaaaattacgtgctgaaaggcaacgacgatactgcgctggaatttcgtcgtgctatctccgtgctgaaaagccttccgtttgaggtacgtagcctgaaagacacggaaggattgccctggatcagtgatgaagtcaaagggattatggaagaaatcatcgaagtcggggagtcgcgtgaagtgcaggccgtgctcaatgatgagtggtatcaaagcttccacgcatttacgcgtgtctttggagtgggggtgaagacagcagacaagtggtaccgcatgggtctgcgcaccctcgaggatgttcgttccagcaagaccctgaagttgaccccgtggcagaaagtaggtctgacgtattatgaagatcttgctcgcggcgttacgcgtgcggaagctgacgcgatttggctgctggttcaggatgcagtcgcaactttcgacccggatgcgatcgtggagattgtcggtggacagcgtcgtgggaaacctcagggtcacgacgttgatctgcttatcagttctccgggagctgaaaaagagcaagaagaccaactcctgcagaaagtgatgaatctgtggaagaaacaagggttgttgctgtgtggtcgtctggaatggagtcagtgggaatgggggactctgccgtccggtaaggctgatgagggtgacgcggaggcgtcgtgctttctgatcctcaaactttatgatcatctggtgcgtaaaagtaaacgcaatatgccgactggttcgaacatgggcgagtccaaaccgtggaaagcaattaaagtagatctgctgcgttgcccccgcggcagttttgcgtttgcgatgttgcagtggaccggaagccgcatgttccgtcgtgatctgcgcgattacgcccgcgaagagaagaacatgatgctggacaatcattcgctgtatgacatgactcgtggtatccaactccctgctaaatcggaagaggaaattttcgaacatctggggcttgaatacctggaaccgttcgaacgtaacgca

SEQ ID NO: 4974 - protein, 529 aa, synthetic construct
  REGION 1..529: note = Variant of terminal deoxynucleotidyltransferase
MHHHHHHGGSGSHGIRTIDSDFGKKQQKKGDNHDSSATYEIKFHEFVLFILEEKMGATRRTFLTDLARKKGFRVENELTDEVTHIVAENLSRSEVLAWLKEHKMEKTKQFELLDISWLIESMKVGKPVDTKGKYQLAESVEVSANPDPTEGRVNELPPTMKTVSPYACQRRTTLNNRNQRFTDSLEILRENYVLKGNDDTALEFRRAISVLKSLPFEVRSLKDTEGLPWISDEVKGIMEEIIEVGESREVQAVLNDEWYQSFHAFTRVFGVGVKTADKWYRMGLRTLEDVRSSKTLKLTPWQKVGLTYYEDLARGVTRAEADAIWLLVQDAVATFDPDAIVEIVGGQRRGKPQGHDVDLLISSPGAEKEQEDQLLQKVMNLWKKQGLLLCGRLEWSQWEWGTLPSGKADEGDAEASCFLILKLYDHLVRKSKRNMPTGSNMGESKPWKAIKVDLLRCPRGSFAFAMLQWTGSRMFRRDLRDYAREEKNMMLDNHSLYDMTRGIQLPAKSEEEIFEHLGLEYLEPFERNA

SEQ ID NO: 4975 - DNA, 1587 bp, synthetic construct
  misc_feature 1..1587: note = Variant of terminal deoxynucleotidyltransferase
  source 1..1587: mol_type = other DNA
atgcaccatcatcatcatcatggcggtagcggcagccacggcattcgtaccatcgattcggacttcgggaagaaacagcagaaaaaaggcgataaccacgatagttccgccacttatgaaatcaaatttcacgagtttgtgctgttcattctcgaagaaaaaatgggtgcgacgcgtcgtacttttctgacagatttagcccgcaagaaagggttccgcgtcgagaatgaactgaccgacgaagttacccacatcgtggcagaaaatctgtcacgctctgaagtattggcttggctgaaagaacacaagatggagaagaccaagcaattcgaactgctggatattagctggcttatcgaaagcatgaaagttggtaaaccggtggacaccaaggggaaataccagttggcggaatcggttgaggtgagtgcgaacccagatccgacagaaggtcgtgtaaacgagctgcctcctactatgaaaaccgtttctccgtatgcgtgtcaacgccgcaccaccctgaacaaccgtaatcaacgttttacggactcgctggagattcttcgcgaaaattacgtgctgaaaggcaacgacgatactgcgctggaatttcgtcgtgctatctccgtgctgaaaagccttccgtttgaggtacgtagcctgaaagacacggaaggattgccctggatcagtgatgaagtcaaagggattatggaagaaatcatcgaagtcggggagtcgcgtgaagtgcaggccgtgctcaatgatgagtggtatcaaagcttccacgcatttacgcgtgtctttggagtgggggtgaagacagcagacaagtggtaccgcatgggtctgcgcaccctcgaggatgttcgttccagcaagaccctgaagttgaccccgtggcagaaagtaggtctgacgtattatgaagatcttgctcgcggcgttacgcgtgcggaagctgacgcgatttggctgctggttcaggatgcagtcgcaactttcgacccggatgcgatcgtggagattgtcggtggacagcgtcgtgggaaacctcagggtcacgacgttgatctgcttatcagttctccgggagctgaaaaagagcaagaagaccaactcctgcagaaagtgatgaatctgtggaagaaacaagggttgttgctgtgtggtcgtctggaatggagtcagtgggaatgggggggtctgcagtccggtaaggctgatgagggtgacgcggaggcgtcgtgctttctgatcctcaaactttatgatcatctggtgcgtaaaagtaaacgcaatatgccgactggttcgaacatgggcgagtccaaaccgtggaaagcaattaaagtagatctgctgcgttgcccccgcggcagttttgcgtttgcgatgttgcagtggaccggaagccgcatgttccgtcgtgatctgcgcgattacgcccgcgaagagaagaacatgatgctggacaatcattcgctgtatgacatgactcgtggtatccaactccctgctaaatcggaagaggaaattttcgaacatctggggcttgaatacctggaaccgttcgaacgtaacgca

SEQ ID NO: 4976 - protein, 529 aa, synthetic construct
  REGION 1..529: note = Variant of terminal deoxynucleotidyltransferase
MHHHHHHGGSGSHGIRTIDSDFGKKQQKKGDNHDSSATYEIKFHEFVLFILEEKMGATRRTFLTDLARKKGFRVENELTDEVTHIVAENLSRSEVLAWLKEHKMEKTKQFELLDISWLIESMKVGKPVDTKGKYQLAESVEVSANPDPTEGRVNELPPTMKTVSPYACQRRTTLNNRNQRFTDSLEILRENYVLKGNDDTALEFRRAISVLKSLPFEVRSLKDTEGLPWISDEVKGIMEEIIEVGESREVQAVLNDEWYQSFHAFTRVFGVGVKTADKWYRMGLRTLEDVRSSKTLKLTPWQKVGLTYYEDLARGVTRAEADAIWLLVQDAVATFDPDAIVEIVGGQRRGKPQGHDVDLLISSPGAEKEQEDQLLQKVMNLWKKQGLLLCGRLEWSQWEWGGLQSGKADEGDAEASCFLILKLYDHLVRKSKRNMPTGSNMGESKPWKAIKVDLLRCPRGSFAFAMLQWTGSRMFRRDLRDYAREEKNMMLDNHSLYDMTRGIQLPAKSEEEIFEHLGLEYLEPFERNA

SEQ ID NO: 4977 - DNA, 1587 bp, synthetic construct
  misc_feature 1..1587: note = Variant of terminal deoxynucleotidyltransferase
  source 1..1587: mol_type = other DNA
atgcaccatcatcatcatcatggcggtagcggcagccacggcattcgtaccatcgattcggacttcgggaagaaacagcagaaaaaaggcgataaccacgatagttccgccacttatgaaatcaaatttcacgagtttgtgctgttcattctcgaagaaaaaatgggtgcgacgcgtcgtacttttctgacagatttagcccgcaagaaagggttccgcgtcgagaatgaactgaccgacgaagttacccacatcgtggcagaaaatctgtcacgctctgaagtattggcttggctgaaagaacacaagatggagaagaccaagcaattcgaactgctggatattagctggcttatcgaaagcatgaaagttggtaaaccggtggacaccaaggggaaataccagttggcggaatcggttgaggtgagtgcgaacccagatccgacagaaggtcgtgtaaacgagctgcctcctactatgaaaaccgtttctccgtatgcgtgtcaacgccgcaccaccctgaacaaccgtaatcaacgttttacggactcgctggagattcttcgcgaaaattacgtgctgaaaggcaacgacgatactgcgctggaatttcgtcgtgctatctccgtgctgaaaagccttccgtttgaggtacgtagcctgaaagacacggaaggattgccctggatcagtgatgaagtcaaagggattatggaagaaatcatcgaagtcggggagtcgcgtgaagtgcaggccgtgctcaatgatgagtggtatcaaagcttccacgcatttacgcgtgtctttggagtgggggtgaagacagcagacaagtggtaccgcatgggtctgcgcaccctcgaggatgttcgttccagcaagaccctgaagttgaccccgtggcagaaagtaggtctgacgtattatgaagatcttgctcgcggcgttacgcgtgcggaagctgacgcgatttggctgctggttcaggatgcagtcgcaactttcgacccggatgcgatcgtggagattgtcggtggacagcgtcgtgggaaacctcagggtcacgacgttgatctgcttatcagttctccgggagctgaaaaagagcaagaagaccaactcctgcagaaagtgatgaatctgtggaagaaacaagggttgttgctgtgtggtcgtctggaatggagtcagtgggaatgggggggtctgccgtccggtaaggctgatgagggtgacgcggaggcgtcgtgctttctgatcctcaaactttatgatcatctggtgcgtaaaagtaaacgcaatatgccgactggttcgaacatgggcgagtccaaaccgtggaaagcaattaaagtagatctgctgcgttgcccccgcggcagttttgcgtttgcgatgttgcagtggaccggaagccgcatgttccgtcgtgatctgcgcgattacgcccgcgaagagaagaacatgaatctggacaatcattcgctgtatgacatgactcgtggtatccaactccctgctaaatcggaagaggaaattttcgaacatctggggcttgaatacctggaaccgttcgaacgtaacgca

SEQ ID NO: 4978 - protein, 529 aa, synthetic construct
  REGION 1..529: note = Variant of terminal deoxynucleotidyltransferase
MHHHHHHGGSGSHGIRTIDSDFGKKQQKKGDNHDSSATYEIKFHEFVLFILEEKMGATRRTFLTDLARKKGFRVENELTDEVTHIVAENLSRSEVLAWLKEHKMEKTKQFELLDISWLIESMKVGKPVDTKGKYQLAESVEVSANPDPTEGRVNELPPTMKTVSPYACQRRTTLNNRNQRFTDSLEILRENYVLKGNDDTALEFRRAISVLKSLPFEVRSLKDTEGLPWISDEVKGIMEEIIEVGESREVQAVLNDEWYQSFHAFTRVFGVGVKTADKWYRMGLRTLEDVRSSKTLKLTPWQKVGLTYYEDLARGVTRAEADAIWLLVQDAVATFDPDAIVEIVGGQRRGKPQGHDVDLLISSPGAEKEQEDQLLQKVMNLWKKQGLLLCGRLEWSQWEWGGLPSGKADEGDAEASCFLILKLYDHLVRKSKRNMPTGSNMGESKPWKAIKVDLLRCPRGSFAFAMLQWTGSRMFRRDLRDYAREEKNMNLDNHSLYDMTRGIQLPAKSEEEIFEHLGLEYLEPFERNA

SEQ ID NO: 4979 - DNA, 1587 bp, synthetic construct
  misc_feature 1..1587: note = Variant of terminal deoxynucleotidyltransferase
  source 1..1587: mol_type = other DNA
atgcaccatcatcatcatcatggcggtagcggcagccacggcattcgtaccatcgattcggacttcgggaagaaacagcagaaaaaaggcgataaccacgatagttccgccacttatgaaatcaaatttcacgagtttgtgctgttcattctcgaagaaaaaatgggtgcgacgcgtcgtacttttctgacagatttagcccgcaagaaagggttccgcgtcgagaatgaactgaccgacgaagttacccacatcgtggcagaaaatctgtcacgctctgaagtattggcttggctgaaagaacacaagatggagaagaccaagcaattcgaactgctggatattagctggcttatcgaaagcatgaaagttggtaaaccggtggacaccaaggggaaataccagttggcggaatcggttgaggtgagtgcgaacccagatccgacagaaggtcgtgtaaacgagctgcctcctactatgaaaaccgtttctccgtatgcgtgtcaacgccgcaccaccctgaacaaccgtaatcaacgttttacggactcgctggagattcttcgcgaaaattacgtgctgaaaggcaacgacgatactgcgctggaatttcgtcgtgctatctccgtgctgaaaagccttccgtttgaggtacgtagcctgaaagacacggaaggattgccctggatcagtgatgaagtcaaagggattatggaagaaatcatcgaagtcggggagtcgcgtgaagtgcaggccgtgctcaatgatgagtggtatcaaagcttccacgcatttacgcgtgtctttggagtgggggtgaagacagcagacaagtggtaccgcatgggtctgcgcaccctcgaggatgttcgttccagcaagaccctgaagttgaccccgtggcagaaagtaggtctgacgtattatgaagatcttgctcgcggcgttacgcgtgcggaagctgacgcgatttggctgctggttcaggatgcagtcgcaactttcgacccggatgcgatcgtggagattgtcggtggacagcgtcgtgggaaacctcagggtcacgacgttgatctgcttatcagttctccgggagctgaaaaagagcaagaagaccaactcctgcagaaagtgatgaatctgtggaagaaacaagggttgttgctgtgtggtcgtctggaatggagtcagtgggaatgggggggtctgccgtccggtaaggctgatgagggtgacgcggaggcgtcgtgctttctgatcctcaaactttatgatcatctggtgcgtaaaagtaaacgcaatatgccgactggttcgaacatgggcgagtccaaaccgtggaaagcaattaaagtagatctgctgcgttgcccccgcggcagttttgcgtttgcgatgttgcagtggaccggaagccgcatgttccgtcgtgatctgcgcgattacgcccgcgaagagaagaacatgatgctggacaatcattcgctgtatgacatgactcgtggtatccaactccctgctaaatcggaagaggaaattttcgaacatctgagtcttgaatacctggaaccgttcgaacgtaacgca

SEQ ID NO: 4980 - protein, 529 aa, synthetic construct
  REGION 1..529: note = Variant of terminal deoxynucleotidyltransferase
MHHHHHHGGSGSHGIRTIDSDFGKKQQKKGDNHDSSATYEIKFHEFVLFILEEKMGATRRTFLTDLARKKGFRVENELTDEVTHIVAENLSRSEVLAWLKEHKMEKTKQFELLDISWLIESMKVGKPVDTKGKYQLAESVEVSANPDPTEGRVNELPPTMKTVSPYACQRRTTLNNRNQRFTDSLEILRENYVLKGNDDTALEFRRAISVLKSLPFEVRSLKDTEGLPWISDEVKGIMEEIIEVGESREVQAVLNDEWYQSFHAFTRVFGVGVKTADKWYRMGLRTLEDVRSSKTLKLTPWQKVGLTYYEDLARGVTRAEADAIWLLVQDAVATFDPDAIVEIVGGQRRGKPQGHDVDLLISSPGAEKEQEDQLLQKVMNLWKKQGLLLCGRLEWSQWEWGGLPSGKADEGDAEASCFLILKLYDHLVRKSKRNMPTGSNMGESKPWKAIKVDLLRCPRGSFAFAMLQWTGSRMFRRDLRDYAREEKNMMLDNHSLYDMTRGIQLPAKSEEEIFEHLSLEYLEPFERNA

SEQ ID NO: 4981 - DNA, 1587 bp, synthetic construct
  misc_feature 1..1587: note = Variant of terminal deoxynucleotidyltransferase
  source 1..1587: mol_type = other DNA
atgcaccatcatcatcatcatggcggtagcggcagccacggcattcgtaccatcgattcggacttcgggaagaaacagcagaaaaaaggcgataaccacgatagttccgccacttatgaaatcaaatttcacgagtttgtgctgttcattctcgaagaaaaaatgggtgcgacgcgtcgtacttttctgacagatttagcccgcaagaaagggttccgcgtcgagaatgaactgaccgacgaagttacccacatcgtggcagaaaatctgtcacgctctgaagtattggcttggctgaaagaacacaagatggagaagaccaagcaattcgaactgctggatattagctggcttatcgaaagcatgaaagttggtaaaccggtggacaccaaggggaaataccagttggcggaatcggttgaggtgagtgcgaacccagatccgacagaaggtcgtgtaaacgagctgcctcctactatgaaaaccgtttctccgtatgcgtgtcaacgccgcaccaccctgaacaaccgtaatcaacgttttacggactcgctggagattcttcgcgaaaattacgtgctgaaaggcaacgacgatactgcgctggaatttcgtcgtgctatctccgtgctgaaaagccttccgtttgaggtacgtagcctgaaagacacggaaggattgccctggatcagtgatgaagtcaaagggattatggaagaaatcatcgaagtcggggagtcgcgtgaagtgcaggccgtgctcaatgatgagtggtatcaaagcttccacgcatttacgcgtgtctttggagtgggggtgaagacagcagacaagtggtaccgcatgggtctgcgcaccctcgaggatgttcgttccagcaagaccctgaagttgaccccgtggcagaaagtaggtctgacgtattatgaagatcttgctcgcggcgttacgcgtgcggaagctgacgcgatttggctgctggttcaggatgcagtcgcaactttcgacccggatgcgatcgtggagattgtcggtggacagcgtcgtgggaaacctcagggtcacgacgttgatctgcttatcagttctccgggagctgaaaaagagcaagaagaccaactcctgcagaaagtgatgaatctgtggaagaaacaagggttgttgctgtgtggtcgtctggaatggagtcagtgggaatgggggctgctgccgtccggtaaggctgatgagggtgacgcggaggcgtcgtgctttctgatcctcaaactttatgatcatctggtgcgtaaaagtaaacgcaatatgccgactggttcgaacatgggcgagtccaaaccgtggaaagcaattaaagtagatctgctgcgttgcccccgcggcagttttgcgtttgcgatgttgcagtggaccggaagccgcatgttccgtcgtgatctgcgcgattacgcccgcgaagagaagaacatgatgctggacaatcattcgctgtatgacatgactcgtggtatccaactccctgctaaatcggaagaggaaattttcgaacatctggggcttgaatacctggaaccgttcgaacgtaacgca

SEQ ID NO: 4982 - protein, 529 aa, synthetic construct
  REGION 1..529: note = Variant of terminal deoxynucleotidyltransferase
MHHHHHHGGSGSHGIRTIDSDFGKKQQKKGDNHDSSATYEIKFHEFVLFILEEKMGATRRTFLTDLARKKGFRVENELTDEVTHIVAENLSRSEVLAWLKEHKMEKTKQFELLDISWLIESMKVGKPVDTKGKYQLAESVEVSANPDPTEGRVNELPPTMKTVSPYACQRRTTLNNRNQRFTDSLEILRENYVLKGNDDTALEFRRAISVLKSLPFEVRSLKDTEGLPWISDEVKGIMEEIIEVGESREVQAVLNDEWYQSFHAFTRVFGVGVKTADKWYRMGLRTLEDVRSSKTLKLTPWQKVGLTYYEDLARGVTRAEADAIWLLVQDAVATFDPDAIVEIVGGQRRGKPQGHDVDLLISSPGAEKEQEDQLLQKVMNLWKKQGLLLCGRLEWSQWEWGLLPSGKADEGDAEASCFLILKLYDHLVRKSKRNMPTGSNMGESKPWKAIKVDLLRCPRGSFAFAMLQWTGSRMFRRDLRDYAREEKNMMLDNHSLYDMTRGIQLPAKSEEEIFEHLGLEYLEPFERNA

SEQ ID NO: 4983 - DNA, 1587 bp, synthetic construct
  misc_feature 1..1587: note = Variant of terminal deoxynucleotidyltransferase
  source 1..1587: mol_type = other DNA
atgcaccatcatcatcatcatggcggtagcggcagccacggcattcgtaccatcgattcggacttcgggaagaaacagcagaaaaaaggcgataaccacgatagttccgccacttatgaaatcaaatttcacgagtttgtgctgttcattctcgaagaaaaaatgggtgcgacgcgtcgtacttttctgacagatttagcccgcaagaaagggttccgcgtcgagaatgaactgaccgacgaagttacccacatcgtggcagaaaatctgtcacgctctgaagtattggcttggctgaaagaacacaagatggagaagaccaagcaattcgaactgctggatattagctggcttatcgaaagcatgaaagttggtaaaccggtggacaccaaggggaaataccagttggcggaatcggttgaggtgagtgcgaacccagatccgacagaaggtcgtgtaaacgagctgcctcctactatgaaaaccgtttctccgtatgcgtgtcaacgccgcaccaccctgaacaaccgtaatcaacgttttacggactcgctggagattcttcgcgaaaattacgtgctgaaaggcaacgacgatactgcgctggaatttcgtcgtgctatctccgtgctgaaaagccttccgtttgaggtacgtagcctgaaagacacggaaggattgccctggatcagtgatgaagtcaaagggattatggaagaaatcatcgaagtcggggagtcgcgtgaagtgcaggccgtgctcaatgatgagtggtatcaaagcttccacgcatttacgcgtgtctttggagtgggggtgaagacagcagacaagtggtaccgcatgggtctgcgcaccctcgaggatgttcgttccagcaagaccctgaagttgaccccgtggcagaaagtaggtctgacgtattatgaagatcttgctcgcggcgttacgcgtgcggaagctgacgcgatttggctgctggttcaggatgcagtcgcaactttcgacccggatgcgatcgtggagattgtcggtggacagcgtcgtgggaaacctcagggtcacgacgttgatctgcttatcagttctccgggagctgaaaaagagcaagaagaccaactcctgcagaaagtgatgaatctgtggaagaaacaagggttgttgctgtgtggtcgtctggaatggagtcagtgggaatgggggggtctgccgtccggtaaggctgatgagggtgacgcggaggcgtcgtgctttctgatcctcaaactttatgatcatctggtgcgtaaaagtaaacgcaatatgccgactggttcgaacatgggcgagtccaaaccgtggaaagcaattaaagtagatctgctgcgttgcccccgcggcagttttgcgtttgcgatgttgcagtggaccggaagccgcatgttccgtcgtgatctgcgcgattacgcccgcgaagagaagaacatgacgctggacaatcattcgctgtatgacatgactcgtggtatccaactccctgctaaatcggaagaggaaattttcgaacatctggggcttgaatacctggaaccgttcgaacgtaacgca

SEQ ID NO: 4984 - protein, 529 aa, synthetic construct
  REGION 1..529: note = Variant of terminal deoxynucleotidyltransferase
MHHHHHHGGSGSHGIRTIDSDFGKKQQKKGDNHDSSATYEIKFHEFVLFILEEKMGATRRTFLTDLARKKGFRVENELTDEVTHIVAENLSRSEVLAWLKEHKMEKTKQFELLDISWLIESMKVGKPVDTKGKYQLAESVEVSANPDPTEGRVNELPPTMKTVSPYACQRRTTLNNRNQRFTDSLEILRENYVLKGNDDTALEFRRAISVLKSLPFEVRSLKDTEGLPWISDEVKGIMEEIIEVGESREVQAVLNDEWYQSFHAFTRVFGVGVKTADKWYRMGLRTLEDVRSSKTLKLTPWQKVGLTYYEDLARGVTRAEADAIWLLVQDAVATFDPDAIVEIVGGQRRGKPQGHDVDLLISSPGAEKEQEDQLLQKVMNLWKKQGLLLCGRLEWSQWEWGGLPSGKADEGDAEASCFLILKLYDHLVRKSKRNMPTGSNMGESKPWKAIKVDLLRCPRGSFAFAMLQWTGSRMFRRDLRDYAREEKNMTLDNHSLYDMTRGIQLPAKSEEEIFEHLGLEYLEPFERNA

SEQ ID NO: 4985 - DNA, 1587 bp, synthetic construct
  misc_feature 1..1587: note = Variant of terminal deoxynucleotidyltransferase
  source 1..1587: mol_type = other DNA
atgcaccatcatcatcatcatggcggtagcggcagccacggcattcgtaccatcgattcggacttcgggaagaaacagcagaaaaaaggcgataaccacgatagttccgccacttatgaaatcaaatttcacgagtttgtgctgttcattctcgaagaaaaaatgggtgcgacgcgtcgtacttttctgacagatttagcccgcaagaaagggttccgcgtcgagaatgaactgaccgacgaagttacccacatcgtggcagaaaatctgtcacgctctgaagtattggcttggctgaaagaacacaagatggagaagaccaagcaattcgaactgctggatattagctggcttatcgaaagcatgaaagttggtaaaccggtggacaccaaggggaaataccagttggcggaatcggttgaggtgagtgcgaacccagatccgacagaaggtcgtgtaaacgagctgcctcctactatgaaaaccgtttctccgtatgcgtgtcaacgccgcaccaccctgaacaaccgtaatcaacgttttacggactcgctggagattcttcgcgaaaattacgtgctgaaaggcaacgacgatactgcgctggaatttcgtcgtgctatctccgtgctgaaaagccttccgtttgaggtacgtagcctgaaagacacggaaggattgccctggatcagtgatgaagtcaaagggattatggaagaaatcatcgaagtcggggagtcgcgtgaagtgcaggccgtgctcaatgatgagtggtatcaaagcttccacgcatttacgcgtgtctttggagtgggggtgaagacagcagacaagtggtaccgcatgggtctgcgcaccctcgaggatgttcgttccagcaagaccctgaagttgaccccgtggcagaaagtaggtctgacgtattatgaagatcttgctcgcggcgttacgcgtgcggaagctgacgcgatttggctgctggttcaggatgcagtcgcaactttcgacccggatgcgatcgtggagattgtcggtggacagcgtcgtgggaaacctcagggtcacgacgttgatctgcttatcagttctccgggagctgaaaaagagcaagaagaccaactcctgcagaaagtgatgaatctgtggaagaaacaagggttgttgctgtgtggtcgtctggaatggagtcagtgggaatgggggggtctgccgtccggtaaggctgatgagggtgacgcggaggcgtcgtgctttctgatcctcaaactttatgatcatctggtgcgtaaaagtaaacgcaatatgccgactggttcgaacatgggcgagtccaaaccgtggaaagcaattaaagtagatctgctgcgttgcccccgcggcagttttgcgtttgcgatgttgcagtggaccggaagccgcatgttccgtcgtgatctgcgcgattacgcccgcgaagagaagaacatgtcgctggacaatcattcgctgtatgacatgactcgtggtatccaactccctgctaaatcggaagaggaaattttcgaacatctggggcttgaatacctggaaccgttcgaacgtaacgca

SEQ ID NO: 4986 - protein, 529 aa, synthetic construct
  REGION 1..529: note = Variant of terminal deoxynucleotidyltransferase
MHHHHHHGGSGSHGIRTIDSDFGKKQQKKGDNHDSSATYEIKFHEFVLFILEEKMGATRRTFLTDLARKKGFRVENELTDEVTHIVAENLSRSEVLAWLKEHKMEKTKQFELLDISWLIESMKVGKPVDTKGKYQLAESVEVSANPDPTEGRVNELPPTMKTVSPYACQRRTTLNNRNQRFTDSLEILRENYVLKGNDDTALEFRRAISVLKSLPFEVRSLKDTEGLPWISDEVKGIMEEIIEVGESREVQAVLNDEWYQSFHAFTRVFGVGVKTADKWYRMGLRTLEDVRSSKTLKLTPWQKVGLTYYEDLARGVTRAEADAIWLLVQDAVATFDPDAIVEIVGGQRRGKPQGHDVDLLISSPGAEKEQEDQLLQKVMNLWKKQGLLLCGRLEWSQWEWGGLPSGKADEGDAEASCFLILKLYDHLVRKSKRNMPTGSNMGESKPWKAIKVDLLRCPRGSFAFAMLQWTGSRMFRRDLRDYAREEKNMSLDNHSLYDMTRGIQLPAKSEEEIFEHLGLEYLEPFERNA

SEQ ID NO: 4987 - DNA, 1587 bp, synthetic construct
  misc_feature 1..1587: note = Variant of terminal deoxynucleotidyltransferase
  source 1..1587: mol_type = other DNA
atgcaccatcatcatcatcatggcggtagcggcagccacggcattcgtaccatcgattcggacttcgggaagaaacagcagaaaaaaggcgataaccacgatagttccgccacttatgaaatcaaatttcacgagtttgtgctgttcattctcgaagaaaaaatgggtgcgacgcgtcgtacttttctgacagatttagcccgcaagaaagggttccgcgtcgagaatgaactgaccgacgaagttacccacatcgtggcagaaaatctgtcacgctctgaagtattggcttggctgaaagaacacaagatggagaagaccaagcaattcgaactgctggatattagctggcttatcgaaagcatgaaagttggtaaaccggtggacaccaaggggaaataccagttggcggaatcggttgaggtgagtgcgaacccagatccgacagaaggtcgtgtaaacgagctgcctcctactatgaaaaccgtttctccgtatgcgtgtcaacgccgcaccaccctgaacaaccgtaatcaacgttttacggactcgctggagattcttcgcgaaaattacgtgctgaaaggcaacgacgatactgcgctggaatttcgtcgtgctatctccgtgctgaaaagccttccgtttgaggtacgtagcctgaaagacacggaaggattgccctggatcagtgatgaagtcaaagggattatggaagaaatcatcgaagtcggggagtcgcgtgaagtgcaggccgtgctcaatgatgagtggtatcaaagcttccacgcatttacgcgtgtctttggagtgggggtgaagacagcagacaagtggtaccgcatgggtctgcgcaccctcgaggatgttcgttccagcaagaccctgaagttgaccccgtggcagaaagtaggtctgacgtattatgaagatcttgctcgcggcgttacgcgtgcggaagctgacgcgatttggctgctggttcaggatgcagtcgcaactttcgacccggatgcgatcgtggagattgtcggtggacagcgtcgtgggaaacctcagggtcacgacgttgatctgcttatcagttctccgggagctgaaaaagagcaagaagaccaactcctgcagaaagtgatgaatctgtggaagaaacaagggttgttgctgtgtggtcgtctggaatggagtcagtgggaatgggggccgctgccgtccggtaaggctgatgagggtgacgcggaggcgtcgtgctttctgatcctcaaactttatgatcatctggtgcgtaaaagtaaacgcaatatgccgactggttcgaacatgggcgagtccaaaccgtggaaagcaattaaagtagatctgctgcgttgcccccgcggcagttttgcgtttgcgatgttgcagtggaccggaagccgcatgttccgtcgtgatctgcgcgattacgcccgcgaagagaagaacatgatgctggacaatcattcgctgtatgacatgactcgtggtatccaactccctgctaaatcggaagaggaaattttcgaacatctggggcttgaatacctggaaccgttcgaacgtaacgca

SEQ ID NO: 4988 - protein, 529 aa, synthetic construct
  REGION 1..529: note = Variant of terminal deoxynucleotidyltransferase
MHHHHHHGGSGSHGIRTIDSDFGKKQQKKGDNHDSSATYEIKFHEFVLFILEEKMGATRRTFLTDLARKKGFRVENELTDEVTHIVAENLSRSEVLAWLKEHKMEKTKQFELLDISWLIESMKVGKPVDTKGKYQLAESVEVSANPDPTEGRVNELPPTMKTVSPYACQRRTTLNNRNQRFTDSLEILRENYVLKGNDDTALEFRRAISVLKSLPFEVRSLKDTEGLPWISDEVKGIMEEIIEVGESREVQAVLNDEWYQSFHAFTRVFGVGVKTADKWYRMGLRTLEDVRSSKTLKLTPWQKVGLTYYEDLARGVTRAEADAIWLLVQDAVATFDPDAIVEIVGGQRRGKPQGHDVDLLISSPGAEKEQEDQLLQKVMNLWKKQGLLLCGRLEWSQWEWGPLPSGKADEGDAEASCFLILKLYDHLVRKSKRNMPTGSNMGESKPWKAIKVDLLRCPRGSFAFAMLQWTGSRMFRRDLRDYAREEKNMMLDNHSLYDMTRGIQLPAKSEEEIFEHLGLEYLEPFERNA

SEQ ID NO: 4989 - DNA, 1587 bp, synthetic construct
  misc_feature 1..1587: note = Variant of terminal deoxynucleotidyltransferase
  source 1..1587: mol_type = other DNA
atgcaccatcatcatcatcatggcggtagcggcagccacggcattcgtaccatcgattcggacttcgggaagaaacagcagaaaaaaggcgataaccacgatagttccgccacttatgaaatcaaatttcacgagtttgtgctgttcattctcgaagaaaaaatgggtgcgacgcgtcgtacttttctgacagatttagcccgcaagaaagggttccgcgtcgagaatgaactgaccgacgaagttacccacatcgtggcagaaaatctgtcacgctctgaagtattggcttggctgaaagaacacaagatggagaagaccaagcaattcgaactgctggatattagctggcttatcgaaagcatgaaagttggtaaaccggtggacaccaaggggaaataccagttggcggaatcggttgaggtgagtgcgaacccagatccgacagaaggtcgtgtaaacgagctgcctcctactatgaaaaccgtttctccgtatgcgtgtcaacgccgcaccaccctgaacaaccgtaatcaacgttttacggactcgctggagattcttcgcgaaaattacgtgctgaaaggcaacgacgatactgcgctggaatttcgtcgtgctatctccgtgctgaaaagccttccgtttgaggtacgtagcctgaaagacacggaaggattgccctggatcagtgatgaagtcaaagggattatggaagaaatcatcgaagtcggggagtcgcgtgaagtgcaggccgtgctcaatgatgagtggtatcaaagcttccacgcatttacgcgtgtctttggagtgggggtgaagacagcagacaagtggtaccgcatgggtctgcgcaccctcgaggatgttcgttccagcaagaccctgaagttgaccccgtggcagaaagtaggtctgacgtattatgaagatcttgctcgcggcgttacgcgtgcggaagctgacgcgatttggctgctggttcaggatgcagtcgcaactttcgacccggatgcgatcgtggagattgtcggtggacagcgtcgtgggaaacctcagggtcacgacgttgatctgcttatcagttctccgggagctgaaaaagagcaagaagaccaactcctgcagaaagtgatgaatctgtggaagaaacaagggttgttgctgtgtggtcgtctggaatggagtggttgggaatgggggggtctgccgtccggtaaggctgatgagggtgacgcggaggcgtcgtgctttctgatcctcaaactttatgatcatctggtgcgtaaaagtaaacgcaatatgccgactggttcgaacatgggcgagtccaaaccgtggaaagcaattaaagtagatctgctgcgttgcccccgcggcagttttgcgtttgcgatgttgcagtggaccggaagccgcatgttccgtcgtgatctgcgcgattacgcccgcgaagagaagaacatgatgctggacaatcattcgctgtatgacatgactcgtggtatccaactccctgctaaatcggaagaggaaattttcgaacatctggggcttgaatacctggaaccgttcgaacgtaacgca

SEQ ID NO: 4990 - protein, 529 aa, synthetic construct
  REGION 1..529: note = Variant of terminal deoxynucleotidyltransferase
MHHHHHHGGSGSHGIRTIDSDFGKKQQKKGDNHDSSATYEIKFHEFVLFILEEKMGATRRTFLTDLARKKGFRVENELTDEVTHIVAENLSRSEVLAWLKEHKMEKTKQFELLDISWLIESMKVGKPVDTKGKYQLAESVEVSANPDPTEGRVNELPPTMKTVSPYACQRRTTLNNRNQRFTDSLEILRENYVLKGNDDTALEFRRAISVLKSLPFEVRSLKDTEGLPWISDEVKGIMEEIIEVGESREVQAVLNDEWYQSFHAFTRVFGVGVKTADKWYRMGLRTLEDVRSSKTLKLTPWQKVGLTYYEDLARGVTRAEADAIWLLVQDAVATFDPDAIVEIVGGQRRGKPQGHDVDLLISSPGAEKEQEDQLLQKVMNLWKKQGLLLCGRLEWSGWEWGGLPSGKADEGDAEASCFLILKLYDHLVRKSKRNMPTGSNMGESKPWKAIKVDLLRCPRGSFAFAMLQWTGSRMFRRDLRDYAREEKNMMLDNHSLYDMTRGIQLPAKSEEEIFEHLGLEYLEPFERNA

SEQ ID NO: 4991 - DNA, 1587 bp, synthetic construct
  misc_feature 1..1587: note = Variant of terminal deoxynucleotidyltransferase
  source 1..1587: mol_type = other DNA
atgcaccatcatcatcatcatggcggtagcggcagccacggcattcgtaccatcgattcggacttcgggaagaaacagcagaaaaaaggcgataaccacgatagttccgccacttatgaaatcaaatttcacgagtttgtgctgttcattctcgaagaaaaaatgggtgcgacgcgtcgtacttttctgacagatttagcccgcaagaaagggttccgcgtcgagaatgaactgaccgacgaagttacccacatcgtggcagaaaatctgtcacgctctgaagtattggcttggctgaaagaacacaagatggagaagaccaagcaattcgaactgctggatattagctggcttatcgaaagcatgaaagttggtaaaccggtggacaccaaggggaaataccagttggcggaatcggttgaggtgagtgcgaacccagatccgacagaaggtcgtgtaaacgagctgcctcctactatgaaaaccgtttctccgtatgcgtgtcaacgccgcaccaccctgaacaaccgtaatcaacgttttacggactcgctggagattcttcgcgaaaattacgtgctgaaaggcaacgacgatactgcgctggaatttcgtcgtgctatctccgtgctgaaaagccttccgtttgaggtacgtagcctgaaagacacggaaggattgccctggatcagtgatgaagtcaaagggattatggaagaaatcatcgaagtcggggagtcgcgtgaagtgcaggccgtgctcaatgatgagtggtatcaaagcttccacgcatttacgcgtgtctttggagtgggggtgaagacagcagacaagtggtaccgcatgggtctgcgcaccctcgaggatgttcgttccagcaagaccctgaagttgaccccgtggcagaaagtaggtctgacgtattatgaagatcttgctcgcggcgttacgcgtgcggaagctgacgcgatttggctgctggttcaggatgcagtcgcaactttcgacccggatgcgatcgtggagattgtcggtggacagcgtcgtgggaaacctcagggtcacgacgttgatctgcttatcagttctccgggagctgaaaaagagcaagaagaccaactcctgcagaaagtgatgaatctgtggaagaaacaagggttgttgctgtgtggtcgtctggaatggagtcagtgggaatgggggaagctgccgtccggtaaggctgatgagggtgacgcggaggcgtcgtgctttctgatcctcaaactttatgatcatctggtgcgtaaaagtaaacgcaatatgccgactggttcgaacatgggcgagtccaaaccgtggaaagcaattaaagtagatctgctgcgttgcccccgcggcagttttgcgtttgcgatgttgcagtggaccggaagccgcatgttccgtcgtgatctgcgcgattacgcccgcgaagagaagaacatgatgctggacaatcattcgctgtatgacatgactcgtggtatccaactccctgctaaatcggaagaggaaattttcgaacatctggggcttgaatacctggaaccgttcgaacgtaacgca

SEQ ID NO: 4992 - protein, 529 aa, synthetic construct
  REGION 1..529: note = Variant of terminal deoxynucleotidyltransferase
MHHHHHHGGSGSHGIRTIDSDFGKKQQKKGDNHDSSATYEIKFHEFVLFILEEKMGATRRTFLTDLARKKGFRVENELTDEVTHIVAENLSRSEVLAWLKEHKMEKTKQFELLDISWLIESMKVGKPVDTKGKYQLAESVEVSANPDPTEGRVNELPPTMKTVSPYACQRRTTLNNRNQRFTDSLEILRENYVLKGNDDTALEFRRAISVLKSLPFEVRSLKDTEGLPWISDEVKGIMEEIIEVGESREVQAVLNDEWYQSFHAFTRVFGVGVKTADKWYRMGLRTLEDVRSSKTLKLTPWQKVGLTYYEDLARGVTRAEADAIWLLVQDAVATFDPDAIVEIVGGQRRGKPQGHDVDLLISSPGAEKEQEDQLLQKVMNLWKKQGLLLCGRLEWSQWEWGKLPSGKADEGDAEASCFLILKLYDHLVRKSKRNMPTGSNMGESKPWKAIKVDLLRCPRGSFAFAMLQWTGSRMFRRDLRDYAREEKNMMLDNHSLYDMTRGIQLPAKSEEEIFEHLGLEYLEPFERNA

SEQ ID NO: 4993 - DNA, 1587 bp, synthetic construct
  misc_feature 1..1587: note = Variant of terminal deoxynucleotidyltransferase
  source 1..1587: mol_type = other DNA
atgcaccatcatcatcatcatggcggtagcggcagccacggcattcgtaccatcgattcggacttcgggaagaaacagcagaaaaaaggcgataaccacgatagttccgccacttatgaaatcaaatttcacgagtttgtgctgttcattctcgaagaaaaaatgggtgcgacgcgtcgtacttttctgacagatttagcccgcaagaaagggttccgcgtcgagaatgaactgaccgacgaagttacccacatcgtggcagaaaatctgtcacgctctgaagtattggcttggctgaaagaacacaagatggagaagaccaagcaattcgaactgctggatattagctggcttatcgaaagcatgaaagttggtaaaccggtggacaccaaggggaaataccagttggcggaatcggttgaggtgagtgcgaacccagatccgacagaaggtcgtgtaaacgagctgcctcctactatgaaaaccgtttctccgtatgcgtgtcaacgccgcaccaccctgaacaaccgtaatcaacgttttacggactcgctggagattcttcgcgaaaattacgtgctgaaaggcaacgacgatactgcgctggaatttcgtcgtgctatctccgtgctgaaaagccttccgtttgaggtacgtagcctgaaagacacggaaggattgccctggatcagtgatgaagtcaaagggattatggaagaaatcatcgaagtcggggagtcgcgtgaagtgcaggccgtgctcaatgatgagtggtatcaaagcttccacgcatttacgcgtgtctttggagtgggggtgaagacagcagacaagtggtaccgcatgggtctgcgcaccctcgaggatgttcgttccagcaagaccctgaagttgaccccgtggcagaaagtaggtctgacgtattatgaagatcttgctcgcggcgttacgcgtgcggaagctgacgcgatttggctgctggttcaggatgcagtcgcaactttcgacccggatgcgatcgtggagattgtcggtggacagcgtcgtgggaaacctcagggtcacgacgttgatctgcttatcagttctccgggagctgaaaaagagcaagaagaccaactcctgcagaaagtgatgaatctgtggaagaaacaagggttgttgctgtgtggtcgtctggaatggagtcagtgggaatgggggggtctgccgtccggtaaggctgatgagggtgacgcggaggcgtcgtgctttctgatcctcaaactttatgatcatctggtgcgtaaaagtaaacgcaatatgccgactggttcgaacatgggcgagtccaaaccgtggaaagcaattaaagtagatctgctgcgttgcccccgcggcagttttgcgtttgcgatgttgcagtggaccggaagccgcatgttccgtcgtgatctgcgcgattacgcccgcgaagagaagaacatggttctggacaatcattcgctgtatgacatgactcgtggtatccaactccctgctaaatcggaagaggaaattttcgaacatctggggcttgaatacctggaaccgttcgaacgtaacgca

SEQ ID NO: 4994 - protein, 529 aa, synthetic construct
  REGION 1..529: note = Variant of terminal deoxynucleotidyltransferase
MHHHHHHGGSGSHGIRTIDSDFGKKQQKKGDNHDSSATYEIKFHEFVLFILEEKMGATRRTFLTDLARKKGFRVENELTDEVTHIVAENLSRSEVLAWLKEHKMEKTKQFELLDISWLIESMKVGKPVDTKGKYQLAESVEVSANPDPTEGRVNELPPTMKTVSPYACQRRTTLNNRNQRFTDSLEILRENYVLKGNDDTALEFRRAISVLKSLPFEVRSLKDTEGLPWISDEVKGIMEEIIEVGESREVQAVLNDEWYQSFHAFTRVFGVGVKTADKWYRMGLRTLEDVRSSKTLKLTPWQKVGLTYYEDLARGVTRAEADAIWLLVQDAVATFDPDAIVEIVGGQRRGKPQGHDVDLLISSPGAEKEQEDQLLQKVMNLWKKQGLLLCGRLEWSQWEWGGLPSGKADEGDAEASCFLILKLYDHLVRKSKRNMPTGSNMGESKPWKAIKVDLLRCPRGSFAFAMLQWTGSRMFRRDLRDYAREEKNMVLDNHSLYDMTRGIQLPAKSEEEIFEHLGLEYLEPFERNA

SEQ ID NO: 4995 - DNA, 1587 bp, synthetic construct
  misc_feature 1..1587: note = Variant of terminal deoxynucleotidyltransferase
  source 1..1587: mol_type = other DNA
atgcaccatcatcatcatcatggcggtagcggcagccacggcattcgtaccatcgattcggacttcgggaagaaacagcagaaaaaaggcgataaccacgatagttccgccacttatgaaatcaaatttcacgagtttgtgctgttcattctcgaagaaaaaatgggtgcgacgcgtcgtacttttctgacagatttagcccgcaagaaagggttccgcgtcgagaatgaactgaccgacgaagttacccacatcgtggcagaaaatctgtcacgctctgaagtattggcttggctgaaagaacacaagatggagaagaccaagcaattcgaactgctggatattagctggcttatcgaaagcatgaaagttggtaaaccggtggacaccaaggggaaataccagttggcggaatcggttgaggtgagtgcgaacccagatccgacagaaggtcgtgtaaacgagctgcctcctactatgaaaaccgtttctccgtatgcgtgtcaacgccgcaccaccctgaacaaccgtaatcaacgttttacggactcgctggagattcttcgcgaaaattacgtgctgaaaggcaacgacgatactgcgctggaatttcgtcgtgctatctccgtgctgaaaagccttccgtttgaggtacgtagcctgaaagacacggaaggattgccctggatcagtgatgaagtcaaagggattatggaagaaatcatcgaagtcggggagtcgcgtgaagtgcaggccgtgctcaatgatgagtggtatcaaagcttccacgcatttacgcgtgtctttggagtgggggtgaagacagcagacaagtggtaccgcatgggtctgcgcaccctcgaggatgttcgttccagcaagaccctgaagttgaccccgtggcagaaagtaggtctgacgtattatgaagatcttgctcgcggcgttacgcgtgcggaagctgacgcgatttggctgctggttcaggatgcagtcgcaactttcgacccggatgcgatcgtggagattgtcggtggacagcgtcgtgggaaacctcagggtcacgacgttgatctgcttatcagttctccgggagctgaaaaagagcaagaagaccaactcctgcagaaagtgatgaatctgtggaagaaacaagggttgttgctgtgtggtcgtctggaatggagtcagtgggaatgggggggtctgttgtccggtaaggctgatgagggtgacgcggaggcgtcgtgctttctgatcctcaaactttatgatcatctggtgcgtaaaagtaaacgcaatatgccgactggttcgaacatgggcgagtccaaaccgtggaaagcaattaaagtagatctgctgcgttgcccccgcggcagttttgcgtttgcgatgttgcagtggaccggaagccgcatgttccgtcgtgatctgcgcgattacgcccgcgaagagaagaacatgatgctggacaatcattcgctgtatgacatgactcgtggtatccaactccctgctaaatcggaagaggaaattttcgaacatctggggcttgaatacctggaaccgttcgaacgtaacgca

SEQ ID NO: 4996 - protein, 529 aa, synthetic construct
  REGION 1..529: note = Variant of terminal deoxynucleotidyltransferase
MHHHHHHGGSGSHGIRTIDSDFGKKQQKKGDNHDSSATYEIKFHEFVLFILEEKMGATRRTFLTDLARKKGFRVENELTDEVTHIVAENLSRSEVLAWLKEHKMEKTKQFELLDISWLIESMKVGKPVDTKGKYQLAESVEVSANPDPTEGRVNELPPTMKTVSPYACQRRTTLNNRNQRFTDSLEILRENYVLKGNDDTALEFRRAISVLKSLPFEVRSLKDTEGLPWISDEVKGIMEEIIEVGESREVQAVLNDEWYQSFHAFTRVFGVGVKTADKWYRMGLRTLEDVRSSKTLKLTPWQKVGLTYYEDLARGVTRAEADAIWLLVQDAVATFDPDAIVEIVGGQRRGKPQGHDVDLLISSPGAEKEQEDQLLQKVMNLWKKQGLLLCGRLEWSQWEWGGLLSGKADEGDAEASCFLILKLYDHLVRKSKRNMPTGSNMGESKPWKAIKVDLLRCPRGSFAFAMLQWTGSRMFRRDLRDYAREEKNMMLDNHSLYDMTRGIQLPAKSEEEIFEHLGLEYLEPFERNA

SEQ ID NO: 4997 - DNA, 1587 bp, synthetic construct
  misc_feature 1..1587: note = Variant of terminal deoxynucleotidyltransferase
  source 1..1587: mol_type = other DNA
atgcaccatcatcatcatcatggcggtagcggcagccacggcattcgtaccatcgattcggacttcgggaagaaacagcagaaaaaaggcgataaccacgatagttccgccacttatgaaatcaaatttcacgagtttgtgctgttcattctcgaagaaaaaatgggtgcgacgcgtcgtacttttctgacagatttagcccgcaagaaagggttccgcgtcgagaatgaactgaccgacgaagttacccacatcgtggcagaaaatctgtcacgctctgaagtattggcttggctgaaagaacacaagatggagaagaccaagcaattcgaactgctggatattagctggcttatcgaaagcatgaaagttggtaaaccggtggacaccaaggggaaataccagttggcggaatcggttgaggtgagtgcgaacccagatccgacagaaggtcgtgtaaacgagctgcctcctactatgaaaaccgtttctccgtatgcgtgtcaacgccgcaccaccctgaacaaccgtaatcaacgttttacggactcgctggagattcttcgcgaaaattacgtgctgaaaggcaacgacgatactgcgctggaatttcgtcgtgctatctccgtgctgaaaagccttccgtttgaggtacgtagcctgaaagacacggaaggattgccctggatcagtgatgaagtcaaagggattatggaagaaatcatcgaagtcggggagtcgcgtgaagtgcaggccgtgctcaatgatgagtggtatcaaagcttccacgcatttacgcgtgtctttggagtgggggtgaagacagcagacaagtggtaccgcatgggtctgcgcaccctcgaggatgttcgttccagcaagaccctgaagttgaccccgtggcagaaagtaggtctgacgtattatgaagatcttgctcgcggcgttacgcgtgcggaagctgacgcgatttggctgctggttcaggatgcagtcgcaactttcgacccggatgcgatcgtggagattgtcggtggacagcgtcgtgggaaacctcagggtcacgacgttgatctgcttatcagttctccgggagctgaaaaagagcaagaagaccaactcctgcagaaagtgatgaatctgtggaagaaacaagggttgttgctgtgtggtcgtagggaatggagtcagtgggaatgggggggtctgccgtccggtaaggctgatgagggtgacgcggaggcgtcgtgctttctgatcctcaaactttatgatcatctggtgcgtaaaagtaaacgcaatatgccgactggttcgaacatgggcgagtccaaaccgtggaaagcaattaaagtagatctgctgcgttgcccccgcggcagttttgcgtttgcgatgttgcagtggaccggaagccgcatgttccgtcgtgatctgcgcgattacgcccgcgaagagaagaacatgatgctggacaatcattcgctgtatgacatgactcgtggtatccaactccctgctaaatcggaagaggaaattttcgaacatctggggcttgaatacctggaaccgttcgaacgtaacgca

SEQ ID NO: 4998 - protein, 529 aa, synthetic construct
  REGION 1..529: note = Variant of terminal deoxynucleotidyltransferase
MHHHHHHGGSGSHGIRTIDSDFGKKQQKKGDNHDSSATYEIKFHEFVLFILEEKMGATRRTFLTDLARKKGFRVENELTDEVTHIVAENLSRSEVLAWLKEHKMEKTKQFELLDISWLIESMKVGKPVDTKGKYQLAESVEVSANPDPTEGRVNELPPTMKTVSPYACQRRTTLNNRNQRFTDSLEILRENYVLKGNDDTALEFRRAISVLKSLPFEVRSLKDTEGLPWISDEVKGIMEEIIEVGESREVQAVLNDEWYQSFHAFTRVFGVGVKTADKWYRMGLRTLEDVRSSKTLKLTPWQKVGLTYYEDLARGVTRAEADAIWLLVQDAVATFDPDAIVEIVGGQRRGKPQGHDVDLLISSPGAEKEQEDQLLQKVMNLWKKQGLLLCGRREWSQWEWGGLPSGKADEGDAEASCFLILKLYDHLVRKSKRNMPTGSNMGESKPWKAIKVDLLRCPRGSFAFAMLQWTGSRMFRRDLRDYAREEKNMMLDNHSLYDMTRGIQLPAKSEEEIFEHLGLEYLEPFERNA

SEQ ID NO: 4999 - DNA, 1587 bp, synthetic construct
  misc_feature 1..1587: note = Variant of terminal deoxynucleotidyltransferase
  source 1..1587: mol_type = other DNA
atgcaccatcatcatcatcatggcggtagcggcagccacggcattcgtaccatcgattcggacttcgggaagaaacagcagaaaaaaggcgataaccacgatagttccgccacttatgaaatcaaatttcacgagtttgtgctgttcattctcgaagaaaaaatgggtgcgacgcgtcgtacttttctgacagatttagcccgcaagaaagggttccgcgtcgagaatgaactgaccgacgaagttacccacatcgtggcagaaaatctgtcacgctctgaagtattggcttggctgaaagaacacaagatggagaagaccaagcaattcgaactgctggatattagctggcttatcgaaagcatgaaagttggtaaaccggtggacaccaaggggaaataccagttggcggaatcggttgaggtgagtgcgaacccagatccgacagaaggtcgtgtaaacgagctgcctcctactatgaaaaccgtttctccgtatgcgtgtcaacgccgcaccaccctgaacaaccgtaatcaacgttttacggactcgctggagattcttcgcgaaaattacgtgctgaaaggcaacgacgatactgcgctggaatttcgtcgtgctatctccgtgctgaaaagccttccgtttgaggtacgtagcctgaaagacacggaaggattgccctggatcagtgatgaagtcaaagggattatggaagaaatcatcgaagtcggggagtcgcgtgaagtgcaggccgtgctcaatgatgagtggtatcaaagcttccacgcatttacgcgtgtctttggagtgggggtgaagacagcagacaagtggtaccgcatgggtctgcgcaccctcgaggatgttcgttccagcaagaccctgccattcaccccgtggcagaaagtaggtctgacgaactatgaagatcttgctcgcggcgttacgcgtgcggaagctgacgcgatttggctgctggttcaggatgcagtcgcaactttcgacccggatgcgatcgtggagattgtcggtggacagcgtcgtgggaaacctcagtctcacgacgttgatctgcttatcagttctccgggagctgaaaaagagcaagaagaccaactcctgcagaaagtgatgaatctgtggaagaaacaagggttgttgctgtgtggtaagctggaatatagtcagtgggaatgggggggtctgccgtccggtaaggctgatgagggtgacgcggaggcgtcgtgctttctgatcctcaaactttatgatcatctggtgcgtaaaagtaaacgcaatatgccgactggttcgaacatgggcgagtccaaaccgtggaaagcaattaaagtagatctgctgcgttgcccccgcggcagttttgcgtttgcgatgttgcagtggaccggaagccgcatgttccgtcgtgatctgcgcgattacgcccgcgaagagaagaacatgatgctggacaatcattcgctgtatgacatgactcgtggtatccaactccctgctaaatcggaagaggaaattttcgaacatctggggcttgaatacctggaaccgttcgaacgtaacgca

SEQ ID NO: 5000 - protein, 529 aa, synthetic construct
  REGION 1..529: note = Variant of terminal deoxynucleotidyltransferase
MHHHHHHGGSGSHGIRTIDSDFGKKQQKKGDNHDSSATYEIKFHEFVLFILEEKMGATRRTFLTDLARKKGFRVENELTDEVTHIVAENLSRSEVLAWLKEHKMEKTKQFELLDISWLIESMKVGKPVDTKGKYQLAESVEVSANPDPTEGRVNELPPTMKTVSPYACQRRTTLNNRNQRFTDSLEILRENYVLKGNDDTALEFRRAISVLKSLPFEVRSLKDTEGLPWISDEVKGIMEEIIEVGESREVQAVLNDEWYQSFHAFTRVFGVGVKTADKWYRMGLRTLEDVRSSKTLPFTPWQKVGLTNYEDLARGVTRAEADAIWLLVQDAVATFDPDAIVEIVGGQRRGKPQSHDVDLLISSPGAEKEQEDQLLQKVMNLWKKQGLLLCGKLEYSQWEWGGLPSGKADEGDAEASCFLILKLYDHLVRKSKRNMPTGSNMGESKPWKAIKVDLLRCPRGSFAFAMLQWTGSRMFRRDLRDYAREEKNMMLDNHSLYDMTRGIQLPAKSEEEIFEHLGLEYLEPFERNA

SEQ ID NO: 5001 - DNA, 1587 bp, synthetic construct
  misc_feature 1..1587: note = Variant of terminal deoxynucleotidyltransferase
  source 1..1587: mol_type = other DNA
atgcaccatcatcatcatcatggcggtagcggcagccacggcattcgtaccatcgattcggacttcgggaagaaacagcagaaaaaaggcgataaccacgatagttccgccacttatgaaatcaaatttcacgagtttgtgctgttcattctcgaagaaaaaatgggtgcgacgcgtcgtacttttctgacagatttagcccgcaagaaagggttccgcgtcgagaatgaactgaccgacgaagttacccacatcgtggcagaaaatctgtcacgctctgaagtattggcttggctgaaagaacacaagatggagaagaccaagcaattcgaactgctggatattagctggcttatcgaaagcatgaaagttggtaaaccggtggacaccaaggggaaataccagttggcggaatcggttgaggtgagtgcgaacccagatccgacagaaggtcgtgtaaacgagctgcctcctactatgaaaaccgtttctccgtatgcgtgtcaacgccgcaccaccctgaacaaccgtaatcaacgttttacggactcgctggagattcttcgcgagaattacgtgtttaaaggcaacgacgatactgcgctggaatttcgtcgtgctatctccgtgctgaaaagccttccgtttgaggtacgtagcctgaaagacacggaaggattgccctggatcagtgatgaagtcaaagggattatggaagaaatcatcgaagtcggggagtcgcgtgaagtgcaggccgtgctcaatgatgagtggtatcaaagcttccacgcatttacgcgtgtctttggagtgggggtgaagacagcagacaagtggtaccgcatgggtctgcgcaccctggaggatgttcgttccagcaagaccctgaagttgaccacgtgggcgaaagtaggtctgacgtattatgaagatcttgctcgcggcgttacccgtgcggaagctgacgcgatttggctgctggttcaggatgcagtcgcaactttcgacccggatgcgatcgtggagattgtcggtggacagcgtcgtgggaaacctcagtctcacgacgttgatctgcttatcagttctccgggagctgaaaaagagcaagaagaccaactcctgcagaaagtgatgaatctgtggaagaaacaagggttgttgctgtgtggtcgtctggaatggagtcagtgggaatgggggggtctgccgtccggtaaggctgatgagggtgacggggaggcatcgtgctttctgatcctcaaactttatgatcatctggtgcgtaaaagtaaacgcaatatgccgactggttcgaacatgggcgagtccaaaccgtggaaagcaattaaagtagatctgctgcgttgcccccgcggcagttttgcgtttgcgatgttgcagtggaccggaagccgcatgttccgtcgtgatctgcgcgattacgcccgcgaagagaagaacatgatgctggacaatcatagcctgtatgacatgactcgtggtatccaactccctgctaaatcggaagaggaaattttcgaacatctggggcttgaatacctggaaccgttcgaacgtaacgca

SEQ ID NO: 5002 - protein, 529 aa, synthetic construct
  REGION 1..529: note = Variant of terminal deoxynucleotidyltransferase
MHHHHHHGGSGSHGIRTIDSDFGKKQQKKGDNHDSSATYEIKFHEFVLFILEEKMGATRRTFLTDLARKKGFRVENELTDEVTHIVAENLSRSEVLAWLKEHKMEKTKQFELLDISWLIESMKVGKPVDTKGKYQLAESVEVSANPDPTEGRVNELPPTMKTVSPYACQRRTTLNNRNQRFTDSLEILRENYVFKGNDDTALEFRRAISVLKSLPFEVRSLKDTEGLPWISDEVKGIMEEIIEVGESREVQAVLNDEWYQSFHAFTRVFGVGVKTADKWYRMGLRTLEDVRSSKTLKLTTWAKVGLTYYEDLARGVTRAEADAIWLLVQDAVATFDPDAIVEIVGGQRRGKPQSHDVDLLISSPGAEKEQEDQLLQKVMNLWKKQGLLLCGRLEWSQWEWGGLPSGKADEGDGEASCFLILKLYDHLVRKSKRNMPTGSNMGESKPWKAIKVDLLRCPRGSFAFAMLQWTGSRMFRRDLRDYAREEKNMMLDNHSLYDMTRGIQLPAKSEEEIFEHLGLEYLEPFERNA

SEQ ID NO: 5003 - DNA, 1587 bp, synthetic construct
  misc_feature 1..1587: note = Variant of terminal deoxynucleotidyltransferase
  source 1..1587: mol_type = other DNA
atgcaccatcatcatcatcatggcggtagcggcagccacggcattcgtaccatcgattcggacttcgggaagaaacagcagaaaaaaggcgataaccacgatagttccgccacttatgaaatcaaatttcacgagtttgtgctgttcattctcgaagaaaaaatgggtgcgacgcgtcgtacttttctgacagatttagcccgcaagaaagggttccgcgtcgagaatgaactgaccgacgaagttacccacatcgtggcagaaaatctgtcacgctctgaagtattggcttggctgaaagaacacaagatggagaagaccaagcaattcgaactgctggatattagctggcttatcgaaagcatgaaagttggtaaaccggtggacaccaaggggaaataccagttggcggaatcggttgaggtgagtgcgaacccagatccgacagaaggtcgtgtaaacgagctgcctcctactatgaaaaccgtttctccgtatgcgtgtcaacgccgcaccaccctgaacaaccgtaatcaacgttttacggactcgctggagattcttcgcgaaaattacgtgctgaaaggcaacgacgatactgcgctggaatttcgtcgtgctatctccgtgctgaaaagccttccgtttgaggtacgtagcctgaaagacacggaaggattgccctggatcagtgatgaagtcaaagggattatggaagaaatcatcgaagtcggggagtcgcgtgaagtgcaggccgtgctcaatgatgagtggtatcaaagcttccacgcatttacgcgtgtctttggagtgggggtgaagacagcagacaagtggtaccgcatgggtctgcgcaccctcgaggatgttcgttccagcaagaccctgaagttgaccgaatggcaaaaagtaggtctgacgtattatgaagatcttgctcgcggcgtttgtcgtgcggaagctgacgcgatttggctgctggttcaggatgcagtcgcaactttcgacccggatgcgatcgtggagattgtcggtggacagcgtcgtgggaaacctcagtctcacgacgttgatctgcttatcagttctccgggagctgaaaaagagcaagaagaccaactcctgcagaaagtgatgaatctgtggaagaaacaagggttgttgctgtgtggtcgtctggaatggagtcagtgggaatgggggggtctgccgtccggtaaggctgatgagggtgacgcggaggcgtcgtgctttctgatcctcaaactttatgatcatctggtgcgtaaaagtaaacgcaatatgccgactggttcgaacatgggcgagtccaaaccgtggaaagcaattaaagtagatctgctgcgttgcccccgcggcagttttgcgtttgcgatgttgcagtggaccggaagccgcatgttccgtcgtgatctgcgcgactacgcccgcgaagagaagaacatgatgctggacaatcattcgctgtatgacatgactcgtggtatccaactccctgctaaatcggaagaggaaattttcgaacatctggggcttgaatacctggaaccgttcgaacgtaacgca

SEQ ID NO: 5004 - protein, 529 aa, synthetic construct
  REGION 1..529: note = Variant of terminal deoxynucleotidyltransferase
MHHHHHHGGSGSHGIRTIDSDFGKKQQKKGDNHDSSATYEIKFHEFVLFILEEKMGATRRTFLTDLARKKGFRVENELTDEVTHIVAENLSRSEVLAWLKEHKMEKTKQFELLDISWLIESMKVGKPVDTKGKYQLAESVEVSANPDPTEGRVNELPPTMKTVSPYACQRRTTLNNRNQRFTDSLEILRENYVLKGNDDTALEFRRAISVLKSLPFEVRSLKDTEGLPWISDEVKGIMEEIIEVGESREVQAVLNDEWYQSFHAFTRVFGVGVKTADKWYRMGLRTLEDVRSSKTLKLTEWQKVGLTYYEDLARGVCRAEADAIWLLVQDAVATFDPDAIVEIVGGQRRGKPQSHDVDLLISSPGAEKEQEDQLLQKVMNLWKKQGLLLCGRLEWSQWEWGGLPSGKADEGDAEASCFLILKLYDHLVRKSKRNMPTGSNMGESKPWKAIKVDLLRCPRGSFAFAMLQWTGSRMFRRDLRDYAREEKNMMLDNHSLYDMTRGIQLPAKSEEEIFEHLGLEYLEPFERNA

SEQ ID NO: 5005 - DNA, 1587 bp, synthetic construct
  misc_feature 1..1587: note = Variant of terminal deoxynucleotidyltransferase
  source 1..1587: mol_type = other DNA
atgcaccatcatcatcatcatggcggtagcggcagccacggcattcgtaccatcgattcggacttcgggaagaaacagcagaaaaaaggcgataaccacgatagttccgccacttatgaaatcaaatttcacgagtttgtgctgttcattctcgaagaaaaaatgggtgcgacgcgtcgtacttttctgacagatttagcccgcaagaaagggttccgcgtcgagaatgaactgaccgacgaagttacccacatcgtggcagaaaatctgtcacgctctgaagtattggcttggctgaaagaacacaagatggagaagaccaagcaattcgaactgctggatattagctggcttatcgaaagcatgaaagttggtaaaccggtggacaccaaggggaaataccagttggcggaatcggttgaggtgagtgcgaacccagatccgacagaaggtcgtgtaaacgagctgcctcctactatgaaaaccgtttctccgtatgcgtgtcaacgccgcaccaccctgaacaaccgtaatcaacgttttacggattcgctggagattcttcgcgaaaattacgtgctgaaaggcaacgacgatactgcgctggaatttcgtcgtgctatctccgtgctgaaaagccttccgtttgaggtacgtagcctgaaagacacggaaggattgccctggatcagtgatgaagtcaaagggattatggaagaaatcatcgaagtcggggagtcgcgtgaagtgcaggccgtgctcaatgatgagtggtatcaaagcttccacgcatttacgcgtgtctttggagtgggggtgaagacagcagacaagtggtaccgcatgggtctgcgcaccctcgaggatgttcgttccagcaagaccctgaagctgaccccgtggcagaaagtaggtctgacgtattatgaagatcttgctcgcggcgttacgcgtgcggaagctgacgcgatttggctgctggttcaggatgcagtcgcaactttcgacccggatgcgatcgtggagattgtcggtggacagcgtcgtgggaaacctcagtctcacgacgttgatctgcttatcagttctccgggagctgaaaaagagcaagaagaccaactcctgcagaaagtgatgaatctgtggaagaaacaagggttgttgctgtgtggtcgtctggaatatagtcagtgggaatgggggggtctgccgtccggtaaggctgatgagggtgacgcggaggcgtcgtgctttctgatcctcaaactttatgatcatctggtgcgtaaaagtaaacgcaatatgccgactggttcgaacatgggcgagtccaaaccgtggaaagcaattaaagtagatctgctgcgttgcccccgcggcagttttgcgtttgcgatgttgcagtggaccggaagccgcatgttccgtcgtgatctgcgcgattacgcccgcgaagagaagaacatgatgctggacaatcattcgctgtatgacatgactcgtggtatccaactccctgctaaatcggaagaggaaattttcgaacatctggggcttgaatacctggaaccgttcgaacgtaacgca

SEQ ID NO: 5006 - protein, 529 aa, synthetic construct
  REGION 1..529: note = Variant of terminal deoxynucleotidyltransferase
MHHHHHHGGSGSHGIRTIDSDFGKKQQKKGDNHDSSATYEIKFHEFVLFILEEKMGATRRTFLTDLARKKGFRVENELTDEVTHIVAENLSRSEVLAWLKEHKMEKTKQFELLDISWLIESMKVGKPVDTKGKYQLAESVEVSANPDPTEGRVNELPPTMKTVSPYACQRRTTLNNRNQRFTDSLEILRENYVLKGNDDTALEFRRAISVLKSLPFEVRSLKDTEGLPWISDEVKGIMEEIIEVGESREVQAVLNDEWYQSFHAFTRVFGVGVKTADKWYRMGLRTLEDVRSSKTLKLTPWQKVGLTYYEDLARGVTRAEADAIWLLVQDAVATFDPDAIVEIVGGQRRGKPQSHDVDLLISSPGAEKEQEDQLLQKVMNLWKKQGLLLCGRLEYSQWEWGGLPSGKADEGDAEASCFLILKLYDHLVRKSKRNMPTGSNMGESKPWKAIKVDLLRCPRGSFAFAMLQWTGSRMFRRDLRDYAREEKNMMLDNHSLYDMTRGIQLPAKSEEEIFEHLGLEYLEPFERNA

SEQ ID NO: 5007 - DNA, 1587 bp, synthetic construct
  misc_feature 1..1587: note = Variant of terminal deoxynucleotidyltransferase
  source 1..1587: mol_type = other DNA
atgcaccatcatcatcatcatggcggtagcggcagccacggcattcgtaccatcgattcggacttcgggaagaaacagcagaaaaaaggcgataaccacgatagttccgccacttatgaaatcaaatttcacgagtttgtgctgttcattctcgaagaaaaaatgggtgcgacgcgtcgtacttttctgacagatttagcccgcaagaaagggttccgcgtcgagaatgaactgaccgacgaagttacccacatcgtggcagaaaatctgtcacgctctgaagtattggcttggctgaaagaacacaagatggagaagaccaagcaattcgaactgctggatattagctggcttatcgaaagcatgaaagttggtaaaccggtggacaccaaggggaaataccagttggcggaatcggttgaggtgagtgcgaacccagatccgacagaaggtcgtgtaaacgagctgcctcctactatgaaaaccgtttctccgtatgcgtgtcaacgccgcaccaccctgaacaaccgtaatcaacgttttacggactcgctggagattcttcgcgaaaattacgtgctgaaaggcaacgacgatactgcgctggaatttcgtcgtgctatctccgtgctgaaaagccttccgtttgaggtacgtagcctgaaagacacggaaggattgccctggatcagtgatgaagtcaaagggattatggaagaaatcatcgaagtcggggagtcgcgtgaagtgcaggccgtgctcaatgatgagtggtatcaaagcttccacgcatttacgcgtgtctttggagtgggggtgaagacagcagacaagtggtaccgcatgggtctgcgcaccctcgaggatgttcgttccagcaagaccctgaagttgaccgaatggcaaaaagtaggtctgacgtattatgaagatcttgctcgcggcgttacgcgtgcggaagctgacgcgatttggctgctggttcaggatgcagtcgcaactttcgacccggatgcgatcgtggagattgtcggtggacagcgtcgtgggaaacctcagtctcacgacgttgatctgcttatcagttctccgggagctgaaaaagagcaagaagaccaactcctgcagaaagtgatgaatctgtggaagaaacaagggttgttgctgtgtggtcgtctggaatggagtcagtgggaatgggggggtctgccgtccggtaaggctgatgagggtgacgcggaggcgtcgtgctttctgatcctcaaactttatgatcatctggtgcgtaaaagtaaacgcaatatgccgactggttcgaacatgggcgagtccaaaccgtggaaagcaattaaagtagatctgctgcgttgcccccgcggcagttttgcgtttgcgatgttgcagtggaccggaagccgcatgttccgtcgtgatctgcgcgattacgcccgcgaagagaagaacatgatgctggacaatcatagcctgtatgacatgactcgtggtatccaactccctgctaaatcggaagaggaaattttcgaacatctggggcttgaatacctggaaccgttcgaacgtaacgca

SEQ ID NO: 5008 - protein, 529 aa, synthetic construct
  REGION 1..529: note = Variant of terminal deoxynucleotidyltransferase
MHHHHHHGGSGSHGIRTIDSDFGKKQQKKGDNHDSSATYEIKFHEFVLFILEEKMGATRRTFLTDLARKKGFRVENELTDEVTHIVAENLSRSEVLAWLKEHKMEKTKQFELLDISWLIESMKVGKPVDTKGKYQLAESVEVSANPDPTEGRVNELPPTMKTVSPYACQRRTTLNNRNQRFTDSLEILRENYVLKGNDDTALEFRRAISVLKSLPFEVRSLKDTEGLPWISDEVKGIMEEIIEVGESREVQAVLNDEWYQSFHAFTRVFGVGVKTADKWYRMGLRTLEDVRSSKTLKLTEWQKVGLTYYEDLARGVTRAEADAIWLLVQDAVATFDPDAIVEIVGGQRRGKPQSHDVDLLISSPGAEKEQEDQLLQKVMNLWKKQGLLLCGRLEWSQWEWGGLPSGKADEGDAEASCFLILKLYDHLVRKSKRNMPTGSNMGESKPWKAIKVDLLRCPRGSFAFAMLQWTGSRMFRRDLRDYAREEKNMMLDNHSLYDMTRGIQLPAKSEEEIFEHLGLEYLEPFERNA

SEQ ID NO: 5009 - DNA, 1587 bp, synthetic construct
  misc_feature 1..1587: note = Variant of terminal deoxynucleotidyltransferase
  source 1..1587: mol_type = other DNA
atgcaccatcatcatcatcatggcggtagcggcagccacggcattcgtaccatcgattcggacttcgggaagaaacagcagaaaaaaggcgataaccacgatagttccgccacttatgaaatcaaatttcacgagtttgtgctgttcattctcgaagaaaaaatgggtgcgacgcgtcgtacttttctgacagatttagcccgcaagaaagggttccgcgtcgagaatgaactgaccgacgaagttacccacatcgtggcagaaaatctgtcacgctctgaagtattggcttggctgaaagaacacaagatggagaagaccaagcaattcgaactgctggatattagctggcttatcgaaagcatgaaagttggtaaaccggtggacaccaaggggaaataccagttggcggaatcggttgaggtgagtgcgaacccagatccgacagaaggtcgtgtaaacgagctgcctcctactatgaaaaccgtttctccgtatgcgtgtcaacgccgcaccaccctgaacaaccgtaatcaacgttttacggattcgctggagattcttcgcgaaaattacgtgctgaaaggcaacgacgatactgcgctggaatttcgtcgtgctatctccgtgctgaaaagccttccgtttgaggtacgtagcctgaaagacacggaaggattgccctggatcagtgatgaagtcaaagggattatggaagaaatcatcgaagtcggggagtcgcgtgaagtgcaggccgtgctcaatgatgagtggtatcaaagcttccacgcatttacgcgtgtctttggagtgggggtgaagacagcagacaagtggtaccgcatgggtctgcgcaccctcgaggatgttcgttccagcaagaccctgaagttcaccccgtggcagaaagtaggtctgacgtattatgaagatcttgctcgcggcgttacgcgtgcggaagctgacgcgatttggctgctggttcaggatgcagtcgcaactttcgacccggatgcgatcgtggagattgtcggtggacagcgtcgtgggaaacctcagtctcacgacgttgatctgcttatcagttctccgggagctgaaaaagagcaagaagaccaactcctgcagaaagtgatgaatctgtggaagaaacaagggttgttgctgtgtggtaagctggaatggagtcagtgggaatgggggggtctgccgtccggtaaggctgatgagggtgacgcggaggcgtcgtgctttctgatcctcaaactttatgatcatctggtgcgtaaaagtaaacgcaatatgccgactggttcgaacatgggcgagtccaaaccgtggaaagcaattaaagtagatctgctgcgttgcccccgcggcagttttgcgtttgcgatgttgcagtggaccggaagccgcatgttccgtcgtgatctgcgcgattacgcccgcgaagagaagaacatgatgctggacaatcattcgctgtatgacatgactcgtggtatccaactccctgctaaatcggaagaggaaattttcgaacatctggggcttgaatacctggaaccggccgaacgtaacgca

SEQ ID NO: 5010 - protein, 529 aa, synthetic construct
  REGION 1..529: note = Variant of terminal deoxynucleotidyltransferase
MHHHHHHGGSGSHGIRTIDSDFGKKQQKKGDNHDSSATYEIKFHEFVLFILEEKMGATRRTFLTDLARKKGFRVENELTDEVTHIVAENLSRSEVLAWLKEHKMEKTKQFELLDISWLIESMKVGKPVDTKGKYQLAESVEVSANPDPTEGRVNELPPTMKTVSPYACQRRTTLNNRNQRFTDSLEILRENYVLKGNDDTALEFRRAISVLKSLPFEVRSLKDTEGLPWISDEVKGIMEEIIEVGESREVQAVLNDEWYQSFHAFTRVFGVGVKTADKWYRMGLRTLEDVRSSKTLKFTPWQKVGLTYYEDLARGVTRAEADAIWLLVQDAVATFDPDAIVEIVGGQRRGKPQSHDVDLLISSPGAEKEQEDQLLQKVMNLWKKQGLLLCGKLEWSQWEWGGLPSGKADEGDAEASCFLILKLYDHLVRKSKRNMPTGSNMGESKPWKAIKVDLLRCPRGSFAFAMLQWTGSRMFRRDLRDYAREEKNMMLDNHSLYDMTRGIQLPAKSEEEIFEHLGLEYLEPAERNA

SEQ ID NO: 5011 - DNA, 1587 bp, synthetic construct
  misc_feature 1..1587: note = Variant of terminal deoxynucleotidyltransferase
  source 1..1587: mol_type = other DNA
atgcaccatcatcatcatcatggcggtagcggcagccacggcattcgtaccatcgattcggacttcgggaagaaacagcagaaaaaaggcgataaccacgatagttccgccacttatgaaatcaaatttcacgagtttgtgctgttcattctcgaagaaaaaatgggtgcgacgcgtcgtacttttctgacagatttagcccgcaagaaagggttccgcgtcgagaatgaactgaccgacgaagttacccacatcgtggcagaaaatctgtcacgctctgaagtattggcttggctgaaagaacacaagatggagaagaccaagcaattcgaactgctggatattagctggcttatcgaaagcatgaaagttggtaaaccggtggacaccaaggggaaataccagttggcggaatcggttgaggtgagtgcgaacccagatccgacagaaggtcgtgtaaacgagctgcctcctactatgaaaaccgtttctccgtatgcgtgtcaacgccgcaccaccctgaacaaccgtaatcaacgttttacggactcgctggagattcttcgcgagaattacgtgtttaaaggcaacgacgatactgcgctggaatttcgtcgtgctatctccgtgctgaaaagccttccgtttgaggtacgtagcctgaaagacacggaaggattgccctggatcagtgatgaagtcaaagggattatggaagaaatcatcgaagtcggggagtcgcgtgaagtgcaggccgtgctcaatgatgagtggtatcaaagcttccacgcatttacgcgtgtctttggagtgggggtgaagacagcagacaagtggtaccgcatgggtctgcgcaccctggaggatgttcgttccagcaagaccctgaagttgaccgaatggtcgaaagtaggtctgacgtattatgaagatcttgctcgcggcgttacgcgtgcggaagctgacgcgatttggctgctggttcaggatgcagtcgcaactttcgacccggatgcgatcgtggagattgtcggtggacagcgtcgtgggaaacctcagtctcacgacgttgatctgcttatcagttctccgggagctgaaaaagagcaagaagaccaactcctgcagaaagtgatgaatctgtggaagaaacaagggttgttgctgtgtggtcgtctggaatggagtcagtgggaatgggggggtctgccgtccggtaaggctgatgagggtgacgcggaggcgtcgtgctttctgatcctcaaactttatgatcatctggtgcgtaaaagtaaacgcaatatgccgactggttcgaacatgggcgagtccaaaccgtggaaagcaattaaagtagatctgctgcgttgcccccgcggcagttttgcgtttgcgatgttgcagtggaccggaagccgcatgttccgtcgtgatctgcgcatgtacgcccgcgaagagaagaacatgatgctggacaatcatagcctgtatgacatgactcgtggtatccaactccctgctaaatcggaagaggaaattttcgaacatctggggcttgaatacctggaaccgttcgaacgtaacgca

SEQ ID NO: 5012 - protein, 529 aa, synthetic construct
  REGION 1..529: note = Variant of terminal deoxynucleotidyltransferase
MHHHHHHGGSGSHGIRTIDSDFGKKQQKKGDNHDSSATYEIKFHEFVLFILEEKMGATRRTFLTDLARKKGFRVENELTDEVTHIVAENLSRSEVLAWLKEHKMEKTKQFELLDISWLIESMKVGKPVDTKGKYQLAESVEVSANPDPTEGRVNELPPTMKTVSPYACQRRTTLNNRNQRFTDSLEILRENYVFKGNDDTALEFRRAISVLKSLPFEVRSLKDTEGLPWISDEVKGIMEEIIEVGESREVQAVLNDEWYQSFHAFTRVFGVGVKTADKWYRMGLRTLEDVRSSKTLKLTEWSKVGLTYYEDLARGVTRAEADAIWLLVQDAVATFDPDAIVEIVGGQRRGKPQSHDVDLLISSPGAEKEQEDQLLQKVMNLWKKQGLLLCGRLEWSQWEWGGLPSGKADEGDAEASCFLILKLYDHLVRKSKRNMPTGSNMGESKPWKAIKVDLLRCPRGSFAFAMLQWTGSRMFRRDLRMYAREEKNMMLDNHSLYDMTRGIQLPAKSEEEIFEHLGLEYLEPFERNA

SEQ ID NO: 5013 - DNA, 1587 bp, synthetic construct
  misc_feature 1..1587: note = Variant of terminal deoxynucleotidyltransferase
  source 1..1587: mol_type = other DNA
atgcaccatcatcatcatcatggcggtagcggcagccacggcattcgtaccatcgattcggacttcgggaagaaacagcagaaaaaaggcgataaccacgatagttccgccacttatgaaatcaaatttcacgagtttgtgctgttcattctcgaagaaaaaatgggtgcgacgcgtcgtacttttctgacagatttagcccgcaagaaagggttccgcgtcgagaatgaactgaccgacgaagttacccacatcgtggcagaaaatctgtcacgctctgaagtattggcttggctgaaagaacacaagatggagaagaccaagcaattcgaactgctggatattagctggcttatcgaaagcatgaaagttggtaaaccggtggacaccaaggggaaataccagttggcggaatcggttgaggtgagtgcgaacccagatccgacagaaggtcgtgtaaacgagctgcctcctactatgaaaaccgtttctccgtatgcgtgtcaacgccgcaccaccctgaacaaccgtaatcaacgttttacggactcgctggagattcttcgccgcaattacgtgctgaaaggcaacgacgatactgcgctggaatttcgtcgtgctatctccgtgctgaaaagccttccgtttgaggtacgtagcctgaaagacacggaaggattgccctggatcagtgatgaagtcaaagggattatggaagaaatcatcgaagtcggggagtcgcgtgaagtgcaggccgtgctcaatgatgagtggtatcaaagcttccacgcatttacgcgtgtctttggagtgggggtgaagacagcagacaagtggtaccgcatgggtctgcgcaccctcgaggatgttcgttccagcaagaccctgaagttgaccccgtggcaaaaagtaggtctgacgtattatgaagatcttgctcgcggcgttacgcgtgcggaagctgacgcgatttggctgctggttcaggatgcagtcgcaactttcgacccggatgcgatcgtggagattgtcggtggacagcgtcgtgggaaacctcagtctcacgacgttgatctgcttatcagttctccgggagctgaaaaagagcaagaagaccaactcctgcagaaagtgatgaatctgtggaagaaacaagggttgttgctgtgtggtcgtctggaatggagtcagtgggaatgggggggtctgccgtccggtaaggctgatgagggtgacgcggaggcgtcgtgctttctgatcctcaaactttatgatcatctggtgcgtaaaagtaaacgcaatatgccgactggttcgaacatgggcgagtccaaaccgtggaaagcaattaaagtagatctgctgcgttgcccccgcggcagttttgcgtttgcgatgttgcagtggaccggaagccgcatgttccgtcgtgatctgcgcgactacgcccgcgaagagaagaacatgatgctggacaatcattcgctgtatgacatgactcgtggtatccaactccctgctaaatcggaagaggaaattttcgaacatctggggcttgaatacctggaaccgttcgaacgtaacgca

SEQ ID NO: 5014 - protein, 529 aa, synthetic construct
  REGION 1..529: note = Variant of terminal deoxynucleotidyltransferase
MHHHHHHGGSGSHGIRTIDSDFGKKQQKKGDNHDSSATYEIKFHEFVLFILEEKMGATRRTFLTDLARKKGFRVENELTDEVTHIVAENLSRSEVLAWLKEHKMEKTKQFELLDISWLIESMKVGKPVDTKGKYQLAESVEVSANPDPTEGRVNELPPTMKTVSPYACQRRTTLNNRNQRFTDSLEILRRNYVLKGNDDTALEFRRAISVLKSLPFEVRSLKDTEGLPWISDEVKGIMEEIIEVGESREVQAVLNDEWYQSFHAFTRVFGVGVKTADKWYRMGLRTLEDVRSSKTLKLTPWQKVGLTYYEDLARGVTRAEADAIWLLVQDAVATFDPDAIVEIVGGQRRGKPQSHDVDLLISSPGAEKEQEDQLLQKVMNLWKKQGLLLCGRLEWSQWEWGGLPSGKADEGDAEASCFLILKLYDHLVRKSKRNMPTGSNMGESKPWKAIKVDLLRCPRGSFAFAMLQWTGSRMFRRDLRDYAREEKNMMLDNHSLYDMTRGIQLPAKSEEEIFEHLGLEYLEPFERNA

SEQ ID NO: 5015 - DNA, 1587 bp, synthetic construct
  misc_feature 1..1587: note = Variant of terminal deoxynucleotidyltransferase
  source 1..1587: mol_type = other DNA
atgcaccatcatcatcatcatggcggtagcggcagccacggcattcgtaccatcgattcggacttcgggaagaaacagcagaaaaaaggcgataaccacgatagttccgccacttatgaaatcaaatttcacgagtttgtgctgttcattctcgaagaaaaaatgggtgcgacgcgtcgtacttttctgacagatttagcccgcaagaaagggttccgcgtcgagaatgaactgaccgacgaagttacccacatcgtggcagaaaatctgtcacgctctgaagtattggcttggctgaaagaacacaagatggagaagaccaagcaattcgaactgctggatattagctggcttatcgaaagcatgaaagttggtaaaccggtggacaccaaggggaaataccagttggcggaatcggttgaggtgagtgcgaacccagatccgacagaaggtcgtgtaaacgagctgcctcctactatgaaaaccgtttctccgtatgcgtgtcaacgccgcaccaccctgaacaaccgtaatcaacgttttacggactcgctggagattcttcgcgaaaattacgtgctgaaaggcaacgacgatactgcgctggaatttcgtcgtgctatctccgtgctgaaaagccttccgtttgaggtacgtagcctgaaagacacggaaggattgccctggatcagtgatgaagtcaaagggattatggaagaaatcatcgaagtcggggagtcgcgtgaagtgcaggccgtgctcaatgatgagtggtatcaaagcttccacgcatttacgcgtgtctttggagtgggggtgaagacagcagacaagtggtaccgcatgggtctgcgcaccctcgaggatgttcgttccagcaagaccctgaagttgaccacgtggcaaaaagtaggtctgacgtattatgaagatcttgctcgcggcgttacccgtgcggaagctgacgcgatttggctgctggttcaggatgcagtcgcaactttcgacccggatgcgatcgtggagattgtcggtggacagcgtcgtgggaaacctcagtctcacgacgttgatctgcttatcagttctccgggagctgaaaaagagcaagaagaccaactcctgcagaaagtgatgaatctgtggaagaaacaagggttgttgctgtgtggtcgtctggaatggagtcagtgggaatgggggggtctgccgtccggtaaggctgatgagggtgacgcggaggcgtcgtgctttctgatcctcaaactttatgatcatctggtgcgtaaaagtaaacgcaatatgccgactggttcgaacatgggcgagtccaaaccgtggaaagcaattaaagtagatctgctgcgttgcccccgcggcagttttgcgtttgcgatgttgcagtggaccggaagccgcatgttccgtcgtgatctgcgcgattacgcccgcgaagagaagaacatggaactggacaatcatagcctgtatgacatgactcgtggtatccaactccctgctaaatcggaagaggaaattttcgaacatctggggcttgaatacctggaaccgttcgaacgtaacgca

SEQ ID NO: 5016 - protein, 529 aa, synthetic construct
  REGION 1..529: note = Variant of terminal deoxynucleotidyltransferase
MHHHHHHGGSGSHGIRTIDSDFGKKQQKKGDNHDSSATYEIKFHEFVLFILEEKMGATRRTFLTDLARKKGFRVENELTDEVTHIVAENLSRSEVLAWLKEHKMEKTKQFELLDISWLIESMKVGKPVDTKGKYQLAESVEVSANPDPTEGRVNELPPTMKTVSPYACQRRTTLNNRNQRFTDSLEILRENYVLKGNDDTALEFRRAISVLKSLPFEVRSLKDTEGLPWISDEVKGIMEEIIEVGESREVQAVLNDEWYQSFHAFTRVFGVGVKTADKWYRMGLRTLEDVRSSKTLKLTTWQKVGLTYYEDLARGVTRAEADAIWLLVQDAVATFDPDAIVEIVGGQRRGKPQSHDVDLLISSPGAEKEQEDQLLQKVMNLWKKQGLLLCGRLEWSQWEWGGLPSGKADEGDAEASCFLILKLYDHLVRKSKRNMPTGSNMGESKPWKAIKVDLLRCPRGSFAFAMLQWTGSRMFRRDLRDYAREEKNMELDNHSLYDMTRGIQLPAKSEEEIFEHLGLEYLEPFERNA

SEQ ID NO: 5017 - DNA, 1587 bp, synthetic construct
  misc_feature 1..1587: note = Variant of terminal deoxynucleotidyltransferase
  source 1..1587: mol_type = other DNA
atgcaccatcatcatcatcatggcggtagcggcagccacggcattcgtaccatcgattcggacttcgggaagaaacagcagaaaaaaggcgataaccacgatagttccgccacttatgaaatcaaatttcacgagtttgtgctgttcattctcgaagaaaaaatgggtgcgacgcgtcgtacttttctgacagatttagcccgcaagaaagggttccgcgtcgagaatgaactgaccgacgaagttacccacatcgtggcagaaaatctgtcacgctctgaagtattggcttggctgaaagaacacaagatggagaagaccaagcaattcgaactgctggatattagctggcttatcgaaagcatgaaagttggtaaaccggtggacaccaaggggaaataccagttggcggaatcggttgaggtgagtgcgaacccagatccgacagaaggtcgtgtaaacgagctgcctcctactatgaaaaccgtttctccgtatgcgtgtcaacgccgcaccaccctgaacaaccgtaatcaacgttttacggactcgctggagattcttcgccgcaattacgtgctgaaaggcaacgacgatactgcgctggaatttcgtcgtgctatctccgtgctgaaaagccttccgtttgaggtacgtagcctgaaagacacggaaggattgccctggatcagtgatgaagtcaaagggattatggaagaaatcatcgaagtcggggagtcgcgtgaagtgcaggccgtgctcaatgatgagtggtatcaaagcttccacgcatttacgcgtgtctttggagtgggggtgaagacagcagacaagtggtaccgcatgggtctgcgcaccctcgaggatgttcgttccagcaagaccctgaagttgaccacgtggcagaaagtaggtctgacgtattatgaagatcttgctcgcggcgttacccgtgcggaagctgacgcgatttggctgctggttcaggatgcagtcgcaactttcgacccggatgcgatcgtggagattgtcggtggacagcgtcgtgggaaacctcagtctcacgacgttgatctgcttatcagttctccgggagctgaaaaagagcaagaagaccaactcctgcagaaagtgatgaatctgtggaagaaacaagggttgttgctgtgtggtcgtctggaatggagtcagtgggaatgggggggtctgccgtccggtaaggctgatgagggtgacgcggaggcgtcgtgctttctgatcctcaaactttatgatcatctggtgcgtaaaagtaaacgcaatatgccgactggttcgaacatgggcgagtccaaaccgtggaaagcaattaaagtagatctgctgcgttgcccccgcggcagttttgcgtttgcgatgttgcagtggaccggaagccgcatgttccgtcaggatctgcgcgactacgcccgcgaagagaagaacatggaactggacaatcatagcctgtatgacatgactcgtggtatccaactccctgctaaatcggaagaggaaattttcgaacatctggggcttgaatacctggaaccgttcgaacgtaacgca

SEQ ID NO: 5018 - protein, 529 aa, synthetic construct
  REGION 1..529: note = Variant of terminal deoxynucleotidyltransferase
MHHHHHHGGSGSHGIRTIDSDFGKKQQKKGDNHDSSATYEIKFHEFVLFILEEKMGATRRTFLTDLARKKGFRVENELTDEVTHIVAENLSRSEVLAWLKEHKMEKTKQFELLDISWLIESMKVGKPVDTKGKYQLAESVEVSANPDPTEGRVNELPPTMKTVSPYACQRRTTLNNRNQRFTDSLEILRRNYVLKGNDDTALEFRRAISVLKSLPFEVRSLKDTEGLPWISDEVKGIMEEIIEVGESREVQAVLNDEWYQSFHAFTRVFGVGVKTADKWYRMGLRTLEDVRSSKTLKLTTWQKVGLTYYEDLARGVTRAEADAIWLLVQDAVATFDPDAIVEIVGGQRRGKPQSHDVDLLISSPGAEKEQEDQLLQKVMNLWKKQGLLLCGRLEWSQWEWGGLPSGKADEGDAEASCFLILKLYDHLVRKSKRNMPTGSNMGESKPWKAIKVDLLRCPRGSFAFAMLQWTGSRMFRQDLRDYAREEKNMELDNHSLYDMTRGIQLPAKSEEEIFEHLGLEYLEPFERNA

SEQ ID NO: 5019 - DNA, 1587 bp, synthetic construct
  misc_feature 1..1587: note = Variant of terminal deoxynucleotidyltransferase
  source 1..1587: mol_type = other DNA
atgcaccatcatcatcatcatggcggtagcggcagccacggcattcgtaccatcgattcggacttcgggaagaaacagcagaaaaaaggcgataaccacgatagttccgccacttatgaaatcaaatttcacgagtttgtgctgttcattctcgaagaaaaaatgggtgcgacgcgtcgtacttttctgacagatttagcccgcaagaaagggttccgcgtcgagaatgaactgaccgacgaagttacccacatcgtggcagaaaatctgtcacgctctgaagtattggcttggctgaaagaacacaagatggagaagaccaagcaattcgaactgctggatattagctggcttatcgaaagcatgaaagttggtaaaccggtggacaccaaggggaaataccagttggcggaatcggttgaggtgagtgcgaacccagatccgacagaaggtcgtgtaaacgagctgcctcctactatgaaaaccgtttctccgtatgcgtgtcaacgccgcaccaccctgaacaaccgtaatcaacgttttacggactcgctggagattcttcgccgcaattacgtgctgaaaggcaacgacgatactgcgctggaatttcgtcgtgctatctccgtgctgaaaagccttccgtttgaggtacgtagcctgaaagacacggaaggattgccctggatcagtgatgaagtcaaagggattatggaagaaatcatcgaagtcggggagtcgcgtgaagtgcaggccgtgctcaatgatgagtggtatcaaagcttccacgcatttacgcgtgtctttggagtgggggtgaagacagcagacaagtggtaccgcatgggtctgcgcaccgtggaggatgttcgttccagcaagaccctgaagttgaccacgtgggcgaaagtaggtctgacgtattatgaagatcttgctcgcggcgttacgcgtgcggaagctgacgcgatttggctgctggttcaggatgcagtcgcaactttcgacccggatgcgatcgtggagattgtcggtggacagcgtcgtgggaaacctcagtctcacgacgttgatctgcttatcagttctccgggagctgaaaaagagcaagaagaccaactcctgcagaaagtgatgaatctgtggaagaaacaagggttgttgctgtgtggtcgtctggaatggagtcagtgggaatgggggggtctgccgtccggtaaggctgatgagggtgacgcggaggcatcgtgctttctgatcctcaaactttatgatcatctggtgcgtaaaagtaaacgcaatatgccgactggttcgaacatgggcgagtccaaaccgtggaaagcaattaaagtagatctgctgcgttgcccccgcggcagttttgcgtttgcgatgttgcagtggaccggaagccgcatgttccgtcgtgatctgcgcgactacgcccgcgaagagaagaacatgatgctggacaatcatagcctgtatgacatgactcgtggtatccaactccctgctaaatcggaagaggaaattttcgaacatctggggcttgaatacctggaaccgttcgaacgtaacgca

SEQ ID NO: 5020 - protein, 529 aa, synthetic construct
  REGION 1..529: note = Variant of terminal deoxynucleotidyltransferase
MHHHHHHGGSGSHGIRTIDSDFGKKQQKKGDNHDSSATYEIKFHEFVLFILEEKMGATRRTFLTDLARKKGFRVENELTDEVTHIVAENLSRSEVLAWLKEHKMEKTKQFELLDISWLIESMKVGKPVDTKGKYQLAESVEVSANPDPTEGRVNELPPTMKTVSPYACQRRTTLNNRNQRFTDSLEILRRNYVLKGNDDTALEFRRAISVLKSLPFEVRSLKDTEGLPWISDEVKGIMEEIIEVGESREVQAVLNDEWYQSFHAFTRVFGVGVKTADKWYRMGLRTVEDVRSSKTLKLTTWAKVGLTYYEDLARGVTRAEADAIWLLVQDAVATFDPDAIVEIVGGQRRGKPQSHDVDLLISSPGAEKEQEDQLLQKVMNLWKKQGLLLCGRLEWSQWEWGGLPSGKADEGDAEASCFLILKLYDHLVRKSKRNMPTGSNMGESKPWKAIKVDLLRCPRGSFAFAMLQWTGSRMFRRDLRDYAREEKNMMLDNHSLYDMTRGIQLPAKSEEEIFEHLGLEYLEPFERNA

SEQ ID NO: 5021 - DNA, 1587 bp, synthetic construct
  misc_feature 1..1587: note = Variant of terminal deoxynucleotidyltransferase
  source 1..1587: mol_type = other DNA
atgcaccatcatcatcatcatggcggtagcggcagccacggcattcgtaccatcgattcggacttcgggaagaaacagcagaaaaaaggcgataaccacgatagttccgccacttatgaaatcaaatttcacgagtttgtgctgttcattctcgaagaaaaaatgggtgcgacgcgtcgtacttttctgacagatttagcccgcaagaaagggttccgcgtcgagaatgaactgaccgacgaagttacccacatcgtggcagaaaatctgtcacgctctgaagtattggcttggctgaaagaacacaagatggagaagaccaagcaattcgaactgctggatattagctggcttatcgaaagcatgaaagttggtaaaccggtggacaccaaggggaaataccagttggcggaatcggttgaggtgagtgcgaacccagatccgacagaaggtcgtgtaaacgagctgcctcctactatgaaaaccgtttctccgtatgcgtgtcaacgccgcaccaccctgaacaaccgtaatcaacgttttacggactcgctggagattcttcgcgagaattacgtgtttaaaggcaacgacgatactgcgctggaatttcgtcgtgctatctccgtgctgaaaagccttccgtttgaggtacgtagcctgaaagacacggaaggattgccctggatcagtgatgaagtcaaagggattatggaagaaatcatcgaagtcggggagtcgcgtgaagtgcaggccgtgctcaatgatgagtggtatcaaagcttccacgcatttacgcgtgtctttggagtgggggtgaagacagcagacaagtggtaccgcatgggtctgcgcaccctggaggatgttcgttccagcaagaccctgaagtttaccacgtgggcgaaagtaggtctgacgtattatgaagatcttgctcgcggcgttacccgtgcggaagctgacgcgatttggctgctggttcaggatgcagtcgcaactttcgacccggatgcgatcgtggagattgtcggtggacagcgtcgtgggaaacctcagtctcacgacgttgatctgcttatcagttctccgggagctgaaaaagagcaagaagaccaactcctgcagaaagtgatgaatctgtggaagaaacaagggttgttgctgtgtggtaaactggtgtggagtcagtgggaatgggggggtctgccgtccggtaaggctgatgagggtgacggggaggcatcgtgctttctgatcctcaaactttatgatcatctggtgcgtaaaagtaaacgcaatatgccgactggttcgaacatgggcgagtccaaaccgtggaaagcaattaaagtagatctgctgcgttgcccccgcggcagttttgcgtttgcgatgttgcagtggaccggaagccgcatgttccgtcgcgatctgcgcgattacgcccgcgaagagaagaacatggaactggacaatcattcgctgtatgacatgactcgtggtatccaactccctgctaaatcggaagaggaaattttcgaacatctggggcttgaatacctggaaccgttcgaacgtaacgca

SEQ ID NO: 5022 - protein, 529 aa, synthetic construct
  REGION 1..529: note = Variant of terminal deoxynucleotidyltransferase
MHHHHHHGGSGSHGIRTIDSDFGKKQQKKGDNHDSSATYEIKFHEFVLFILEEKMGATRRTFLTDLARKKGFRVENELTDEVTHIVAENLSRSEVLAWLKEHKMEKTKQFELLDISWLIESMKVGKPVDTKGKYQLAESVEVSANPDPTEGRVNELPPTMKTVSPYACQRRTTLNNRNQRFTDSLEILRENYVFKGNDDTALEFRRAISVLKSLPFEVRSLKDTEGLPWISDEVKGIMEEIIEVGESREVQAVLNDEWYQSFHAFTRVFGVGVKTADKWYRMGLRTLEDVRSSKTLKFTTWAKVGLTYYEDLARGVTRAEADAIWLLVQDAVATFDPDAIVEIVGGQRRGKPQSHDVDLLISSPGAEKEQEDQLLQKVMNLWKKQGLLLCGKLVWSQWEWGGLPSGKADEGDGEASCFLILKLYDHLVRKSKRNMPTGSNMGESKPWKAIKVDLLRCPRGSFAFAMLQWTGSRMFRRDLRDYAREEKNMELDNHSLYDMTRGIQLPAKSEEEIFEHLGLEYLEPFERNA

SEQ ID NO: 5023 - DNA, 1587 bp, synthetic construct
  misc_feature 1..1587: note = Variant of terminal deoxynucleotidyltransferase
  source 1..1587: mol_type = other DNA
atgcaccatcatcatcatcatggcggtagcggcagccacggcattcgtaccatcgattcggacttcgggaagaaacagcagaaaaaaggcgataaccacgatagttccgccacttatgaaatcaaatttcacgagtttgtgctgttcattctcgaagaaaaaatgggtgcgacgcgtcgtacttttctgacagatttagcccgcaagaaagggttccgcgtcgagaatgaactgaccgacgaagttacccacatcgtggcagaaaatctgtcacgctctgaagtattggcttggctgaaagaacacaagatggagaagaccaagcaattcgaactgctggatattagctggcttatcgaaagcatgaaagttggtaaaccggtggacaccaaggggaaataccagttggcggaatcggttgaggtgagtgcgaacccagatccgacagaaggtcgtgtaaacgagctgcctcctactatgaaaaccgtttctccgtatgcgtgtcaacgccgcaccaccctgaacaaccgtaatcaacgttttacggactcgctggagattcttcgcgagaattacgtgtttaaaggcaacgacgatactgcgctggaatttcgtcgtgctatctccgtgctgaaaagccttccgtttgaggtacgtagcctgaaagacacggaaggattgccctggatcagtgatgaagtcaaagggattatggaagaaatcatcgaagtcggggagtcgcgtgaagtgcaggccgtgctcaatgatgagtggtatcaaagcttccacgcatttacgcgtgtctttggagtgggggtgaagacagcagacaagtggtaccgcatgggtctgcgcaccctggaggatgttcgttccagcaagaccctgaagttgaccacgtgggcgaaagtaggtctgacgtattatgaagatcttgctcgcggcgttacccgtgcggaagctgacgcgatttggctgctggttcaggatgcagtcgcaactttcgacccggatgcgatcgtggagattgtcggtggacagcgtcgtgggaaacctcagtctcacgacgttgatctgcttatcagttctccgggagctgaaaaagagcaagaagaccaactcctgcagaaagtgatgaatctgtggaagaaacaagggttgttgctgtgtggtaaactggtgtggagtcagtgggaatgggggggtctgccgtccggtaaggctgatgagggtgacggggaggcatcgtgctttctgatcctcaaactttatgatcatctggtgcgtaaaagtaaacgtaatatgccgactggttcgaacatgggcgagtccaaaccgtggaaagcaattaaagtagatctgctgcgttgcccccgcggcagttttgcgtttgcgatgttgcagtggaccggaagccgcatgttccgtcgcgatctgcgcgattacgcccgcgaagagaagaacatgatgctggacaatcatagcctgtatgacatgactcgtggtatccaactccctgctaaatcggaagaggaaattttcgaacatctggggcttgaatacctggaaccgttcgaacgtaacgca

SEQ ID NO: 5024 - protein, 529 aa, synthetic construct
  REGION 1..529: note = Variant of terminal deoxynucleotidyltransferase
MHHHHHHGGSGSHGIRTIDSDFGKKQQKKGDNHDSSATYEIKFHEFVLFILEEKMGATRRTFLTDLARKKGFRVENELTDEVTHIVAENLSRSEVLAWLKEHKMEKTKQFELLDISWLIESMKVGKPVDTKGKYQLAESVEVSANPDPTEGRVNELPPTMKTVSPYACQRRTTLNNRNQRFTDSLEILRENYVFKGNDDTALEFRRAISVLKSLPFEVRSLKDTEGLPWISDEVKGIMEEIIEVGESREVQAVLNDEWYQSFHAFTRVFGVGVKTADKWYRMGLRTLEDVRSSKTLKLTTWAKVGLTYYEDLARGVTRAEADAIWLLVQDAVATFDPDAIVEIVGGQRRGKPQSHDVDLLISSPGAEKEQEDQLLQKVMNLWKKQGLLLCGKLVWSQWEWGGLPSGKADEGDGEASCFLILKLYDHLVRKSKRNMPTGSNMGESKPWKAIKVDLLRCPRGSFAFAMLQWTGSRMFRRDLRDYAREEKNMMLDNHSLYDMTRGIQLPAKSEEEIFEHLGLEYLEPFERNA

SEQ ID NO: 5025 - DNA, 1587 bp, synthetic construct
  misc_feature 1..1587: note = Variant of terminal deoxynucleotidyltransferase
  source 1..1587: mol_type = other DNA
atgcaccatcatcatcatcatggcggtagcggcagccacggcattcgtaccatcgattcggacttcgggaagaaacagcagaaaaaaggcgataaccacgatagttccgccacttatgaaatcaaatttcacgagtttgtgctgttcattctcgaagaaaaaatgggtgcgacgcgtcgtacttttctgacagatttagcccgcaagaaagggttccgcgtcgagaatgaactgaccgacgaagttacccacatcgtggcagaaaatctgtcacgctctgaagtattggcttggctgaaagaacacaagatggagaagaccaagcaattcgaactgctggatattagctggcttatcgaaagcatgaaagttggtaaaccggtggacaccaaggggaaataccagttggcggaatcggttgaggtgagtgcgaacccagatccgacagaaggtcgtgtaaacgagctgcctcctactatgaaaaccgtttctccgtatgcgtgtcaacgccgcaccaccctgaacaaccgtaatcaacgttttacggactcgctggagattcttcgcgagaattacgtgtttaaaggcaacgacgatactgcgctggaatttcgtcgtgctatctccgtgctgaaaagccttccgtttgaggtacgtagcctgaaagacacggaaggattgccctggatcagtgatgaagtcaaagggattatggaagaaatcatcgaagtcggggagtcgcgtgaagtgcaggccgtgctcaatgatgagtggtatcaaagcttccacgcatttacgcgtgtctttggagtgggggtgaagacagcagacaagtggtaccgcatgggtctgcgcaccctggaggatgttcgttccagcaagaccctgaagttgaccacgtgggcgaaagtaggtctgacgtattatgaagatcttgctcgcggcgttacccgtgcggaagctgacgcgatttggctgctggttcaggatgcagtcgcaactttcgacccggatgcgatcgtggagattgtcggtggacagcgtcgtgggaaacctcagtctcacgacgttgatctgcttatcagttctccgggagctgaaaaagagcaagaagaccaactcctgcagaaagtgatgaatctgtggaagaaacaagggttgttgctgtgtggtcgtgtggtgtggagtcagtgggaatgggggggtctgccgtccggtaaggctgatgagggtgacggggaggcatcgtgctttctgatcctcaaactttatgatcatctggtgcgtaaaagtaaacataatatgccgactggttcgaacatgggcgagtccaaaccgtggaaagcaattaaagtagatctgctgcgttgcccccgcggcagttttgcgtttgcgatgttgcagtggaccggaagccgcatgttccgtgtggatctgcgcgattacgcccgcgaagagaagaacatggaactggacaatcattcgctgtatgacatgactcgtggtatccaactccctgctaaatcggaagaggaaattttcgaacatctggggcttgaatacctggaaccgttcgaacgtaacgca

SEQ ID NO: 5026 - protein, 529 aa, synthetic construct
  REGION 1..529: note = Variant of terminal deoxynucleotidyltransferase
MHHHHHHGGSGSHGIRTIDSDFGKKQQKKGDNHDSSATYEIKFHEFVLFILEEKMGATRRTFLTDLARKKGFRVENELTDEVTHIVAENLSRSEVLAWLKEHKMEKTKQFELLDISWLIESMKVGKPVDTKGKYQLAESVEVSANPDPTEGRVNELPPTMKTVSPYACQRRTTLNNRNQRFTDSLEILRENYVFKGNDDTALEFRRAISVLKSLPFEVRSLKDTEGLPWISDEVKGIMEEIIEVGESREVQAVLNDEWYQSFHAFTRVFGVGVKTADKWYRMGLRTLEDVRSSKTLKLTTWAKVGLTYYEDLARGVTRAEADAIWLLVQDAVATFDPDAIVEIVGGQRRGKPQSHDVDLLISSPGAEKEQEDQLLQKVMNLWKKQGLLLCGRVVWSQWEWGGLPSGKADEGDGEASCFLILKLYDHLVRKSKHNMPTGSNMGESKPWKAIKVDLLRCPRGSFAFAMLQWTGSRMFRVDLRDYAREEKNMELDNHSLYDMTRGIQLPAKSEEEIFEHLGLEYLEPFERNA

SEQ ID NO: 5027 - DNA, 1587 bp, synthetic construct
  misc_feature 1..1587: note = Variant of terminal deoxynucleotidyltransferase
  source 1..1587: mol_type = other DNA
atgcaccatcatcatcatcatggcggtagcggcagccacggcattcgtaccatcgattcggacttcgggaagaaacagcagaaaaaaggcgataaccacgatagttccgccacttatgaaatcaaatttcacgagtttgtgctgttcattctcgaagaaaaaatgggtgcgacgcgtcgtacttttctgacagatttagcccgcaagaaagggttccgcgtcgagaatgaactgaccgacgaagttacccacatcgtggcagaaaatctgtcacgctctgaagtattggcttggctgaaagaacacaagatggagaagaccaagcaattcgaactgctggatattagctggcttatcgaaagcatgaaagttggtaaaccggtggacaccaaggggaaataccagttggcggaatcggttgaggtgagtgcgaacccagatccgacagaaggtcgtgtaaacgagctgcctcctactatgaaaaccgtttctccgtatgcgtgtcaacgccgcaccaccctgaacaaccgtaatcaacgttttacggactcgctggagattcttcgcgagaattacgtgtttaaaggcaacgacgatactgcgctggaatttcgtcgtgctatctccgtgctgaaaagccttccgtttgaggtacgtagcctgaaagacacggaaggattgccctggatcagtgatgaagtcaaagggattatggaagaaatcatcgaagtcggggagtcgcgtgaagtgcaggccgtgctcaatgatgagtggtatcaaagcttccacgcatttacgcgtgtctttggagtgggggtgaagacagcagacaagtggtaccgcatgggtctgcgcaccctggaggatgttcgttccagcaagaccctgaagttgaccacgtgggcgaaagtaggtctgacgtattatgaagatcttgctcgcggcgttacccgtgcggaagctgacgcgatttggctgctggttcaggatgcagtcgcaactttcgacccggatgcgatcgtggagattgtcggtggacagcgtcgtgggaaacctcagtctcacgacgttgatctgcttatcagttctccgggagctgaaaaagagcaagaagaccaactcctgcagaaagtgatgaatctgtggaagaaacaagggttgttgctgtgtggtaaagtggtgtggagtcagtgggaatgggggggtctgccgtccggtaaggctgatgagggtgacggggaggcatcgtgctttctgatcctcaaactttatgatcatctggtgcgtaaaagtaaacataatatgccgactggttcgaacatgggcgagtccaaaccgtggaaagcaattaaagtagatctgctgcgttgcccccgcggcagttttgcgtttgcgatgttgcagtggaccggaagccgcatgttccgtcgcgatctgcgcgattacgcccgcgaagagaagaacatgatgctggacaatcatagcctgtatgacatgactcgtggtatccaactccctgctaaatcggaagaggaaattttcgaacatctggggcttgaatacctggaaccgttcgaacgtaacgca

SEQ ID NO: 5028 - protein, 529 aa, synthetic construct
  REGION 1..529: note = Variant of terminal deoxynucleotidyltransferase
MHHHHHHGGSGSHGIRTIDSDFGKKQQKKGDNHDSSATYEIKFHEFVLFILEEKMGATRRTFLTDLARKKGFRVENELTDEVTHIVAENLSRSEVLAWLKEHKMEKTKQFELLDISWLIESMKVGKPVDTKGKYQLAESVEVSANPDPTEGRVNELPPTMKTVSPYACQRRTTLNNRNQRFTDSLEILRENYVFKGNDDTALEFRRAISVLKSLPFEVRSLKDTEGLPWISDEVKGIMEEIIEVGESREVQAVLNDEWYQSFHAFTRVFGVGVKTADKWYRMGLRTLEDVRSSKTLKLTTWAKVGLTYYEDLARGVTRAEADAIWLLVQDAVATFDPDAIVEIVGGQRRGKPQSHDVDLLISSPGAEKEQEDQLLQKVMNLWKKQGLLLCGKVVWSQWEWGGLPSGKADEGDGEASCFLILKLYDHLVRKSKHNMPTGSNMGESKPWKAIKVDLLRCPRGSFAFAMLQWTGSRMFRRDLRDYAREEKNMMLDNHSLYDMTRGIQLPAKSEEEIFEHLGLEYLEPFERNA

SEQ ID NO: 5029 - DNA, 1587 bp, synthetic construct
  misc_feature 1..1587: note = Variant of terminal deoxynucleotidyltransferase
  source 1..1587: mol_type = other DNA
atgcaccatcatcatcatcatggcggtagcggcagccacggcattcgtaccatcgattcggacttcgggaagaaacagcagaaaaaaggcgataaccacgatagttccgccacttatgaaatcaaatttcacgagtttgtgctgttcattctcgaagaaaaaatgggtgcgacgcgtcgtacttttctgacagatttagcccgcaagaaagggttccgcgtcgagaatgaactgaccgacgaagttacccacatcgtggcagaaaatctgtcacgctctgaagtattggcttggctgaaagaacacaagatggagaagaccaagcaattcgaactgctggatattagctggcttatcgaaagcatgaaagttggtaaaccggtggacaccaaggggaaataccagttggcggaatcggttgaggtgagtgcgaacccagatccgacagaaggtcgtgtaaacgagctgcctcctactatgaaaaccgtttctccgtatgcgtgtcaacgccgcaccaccctgaacaaccgtaatcaacgttttacggactcgctggagattcttcgcgagaattacgtgtttaaaggcaacgacgatactgcgctggaatttcgtcgtgctatctccgtgctgaaaagccttccgtttgaggtacgtagcctgaaagacacggaaggattgccctggatcagtgatgaagtcaaagggattatggaagaaatcatcgaagtcggggagtcgcgtgaagtgcaggccgtgctcaatgatgagtggtatcaaagcttccacgcatttacgcgtgtctttggagtgggggtgaagacagcagacaagtggtaccgcatgggtctgcgcaccctggaggatgttcgttccagcaagaccctgaagctgaccacgtgggcgaaagtaggtctgacgtattatgaagatcttgctcgcggcgttacccgtgcggaagctgacgcgatttggctgctggttcaggatgcagtcgcaactttcgacccggatgcgatcgtggagattgtcggtggacagcgtcgtgggaaacctcagtctcacgacgttgatctgcttatcagttctccgggagctgaaaaagagcaagaagaccaactcctgcagaaagtgatgaatctgtggaagaaacaagggttgttgctgtgtggtaaactggtgtggagtcagtgggaatgggggggtctgccgtccggtaaggctgatgagggtgacggggaggcatcgtgctttctgatcctcaaactttatgatcatctggtgcgtaaaagtaaacgcaatatgccgactggttcgaacatgggcgagtccaaaccgtggaaagcaattaaagtagatctgctgcgttgcccccgcggcagttttgcgtttgcgatgttgcagtggaccggaagccgcatgttccgtgtggatctgcgcgattacgcccgcgaagagaagaacatgatgctggacaatcatcaactgtatgacatgactcgtggtatccaactccctgctaaatcggaagaggaaattttcgaacatctggggcttgaatacctggaaccgttcgaacgtaacgca

SEQ ID NO: 5030 - protein, 529 aa, synthetic construct
  REGION 1..529: note = Variant of terminal deoxynucleotidyltransferase
MHHHHHHGGSGSHGIRTIDSDFGKKQQKKGDNHDSSATYEIKFHEFVLFILEEKMGATRRTFLTDLARKKGFRVENELTDEVTHIVAENLSRSEVLAWLKEHKMEKTKQFELLDISWLIESMKVGKPVDTKGKYQLAESVEVSANPDPTEGRVNELPPTMKTVSPYACQRRTTLNNRNQRFTDSLEILRENYVFKGNDDTALEFRRAISVLKSLPFEVRSLKDTEGLPWISDEVKGIMEEIIEVGESREVQAVLNDEWYQSFHAFTRVFGVGVKTADKWYRMGLRTLEDVRSSKTLKLTTWAKVGLTYYEDLARGVTRAEADAIWLLVQDAVATFDPDAIVEIVGGQRRGKPQSHDVDLLISSPGAEKEQEDQLLQKVMNLWKKQGLLLCGKLVWSQWEWGGLPSGKADEGDGEASCFLILKLYDHLVRKSKRNMPTGSNMGESKPWKAIKVDLLRCPRGSFAFAMLQWTGSRMFRVDLRDYAREEKNMMLDNHQLYDMTRGIQLPAKSEEEIFEHLGLEYLEPFERNA

SEQ ID NO: 5031 - DNA, 1587 bp, synthetic construct
  misc_feature 1..1587: note = Variant of terminal deoxynucleotidyltransferase
  source 1..1587: mol_type = other DNA
atgcaccatcatcatcatcatggcggtagcggcagccacggcattcgtaccatcgattcggacttcgggaagaaacagcagaaaaaaggcgataaccacgatagttccgccacttatgaaatcaaatttcacgagtttgtgctgttcattctcgaagaaaaaatgggtgcgacgcgtcgtacttttctgacagatttagcccgcaagaaagggttccgcgtcgagaatgaactgaccgacgaagttacccacatcgtggcagaaaatctgtcacgctctgaagtattggcttggctgaaagaacacaagatggagaagaccaagcaattcgaactgctggatattagctggcttatcgaaagcatgaaagttggtaaaccggtggacaccaaggggaaataccagttggcggaatcggttgaggtgagtgcgaacccagatccgacagaaggtcgtgtaaacgagctgcctcctactatgaaaaccgtttctccgtatgcgtgtcaacgccgcaccaccctgaacaaccgtaatcaacgttttacggactcgctggagattcttcgcgagaattacgtgtttaaaggcaacgacgatactgcgctggaatttcgtcgtgctatctccgtgctgaaaagccttccgtttgaggtacgtagcctgaaagacacggaaggattgccctggatcagtgatgaagtcaaagggattatggaagaaatcatcgaagtcggggagtcgcgtgaagtgcaggccgtgctcaatgatgagtggtatcaaagcttccacgcatttacgcgtgtctttggagtgggggtgaagacagcagacaagtggtaccgcatgggtctgcgcaccctggaggatgttcgttccagcaagaccctgaagtttaccacgtggtcgaaagtaggtctgacgtattatgaagatcttgctcgcggcgttacccgtgcggaagctgacgcgatttggctgctggttcaggatgcagtcgcaactttcgacccggatgcgatcgtggagattgtcggtggacagcgtcgtgggaaacctcagtctcacgacgttgatctgcttatcagttctccgggagctgaaaaagagcaagaagaccaactcctgcagaaagtgatgaatctgtggaagaaacaagggttgttgctgtgtggtaaagtggcgtggagtcagtgggaatgggggggtctgccgtccggtaaggctgatgagggtgacggggaggcatcgtgctttctgatcctcaaactttatgatcatctggtgcgtaaaagtaaacataatatgccgactggttcgaacatgggcgagtccaaaccgtggaaagcaattaaagtagatctgctgcgttgcccccgcggcagttttgcgtttgcgatgttgcagtggaccggaagccgcatgttccgtcgcgatctgcgcgattacgcccgcgaagagaagaacatgatgctggacaatcatagcctgtatgacatgactcgtggtatccaactccctgctaaatcggaagaggaaattttcgaacatctggggcttgaatacctggaaccgttcgaacgtaacgca

SEQ ID NO: 5032 - protein, 529 aa, synthetic construct
  REGION 1..529: note = Variant of terminal deoxynucleotidyltransferase
MHHHHHHGGSGSHGIRTIDSDFGKKQQKKGDNHDSSATYEIKFHEFVLFILEEKMGATRRTFLTDLARKKGFRVENELTDEVTHIVAENLSRSEVLAWLKEHKMEKTKQFELLDISWLIESMKVGKPVDTKGKYQLAESVEVSANPDPTEGRVNELPPTMKTVSPYACQRRTTLNNRNQRFTDSLEILRENYVFKGNDDTALEFRRAISVLKSLPFEVRSLKDTEGLPWISDEVKGIMEEIIEVGESREVQAVLNDEWYQSFHAFTRVFGVGVKTADKWYRMGLRTLEDVRSSKTLKFTTWSKVGLTYYEDLARGVTRAEADAIWLLVQDAVATFDPDAIVEIVGGQRRGKPQSHDVDLLISSPGAEKEQEDQLLQKVMNLWKKQGLLLCGKVAWSQWEWGGLPSGKADEGDGEASCFLILKLYDHLVRKSKHNMPTGSNMGESKPWKAIKVDLLRCPRGSFAFAMLQWTGSRMFRRDLRDYAREEKNMMLDNHSLYDMTRGIQLPAKSEEEIFEHLGLEYLEPFERNA

SEQ ID NO: 5033 - DNA, 1587 bp, synthetic construct
  misc_feature 1..1587: note = Variant of terminal deoxynucleotidyltransferase
  source 1..1587: mol_type = other DNA
atgcaccatcatcatcatcatggcggtagcggcagccacggcattcgtaccatcgattcggacttcgggaagaaacagcagaaaaaaggcgataaccacgatagttccgccacttatgaaatcaaatttcacgagtttgtgctgttcattctcgaagaaaaaatgggtgcgacgcgtcgtacttttctgacagatttagcccgcaagaaagggttccgcgtcgagaatgaactgaccgacgaagttacccacatcgtggcagaaaatctgtcacgctctgaagtattggcttggctgaaagaacacaagatggagaagaccaagcaattcgaactgctggatattagctggcttatcgaaagcatgaaagttggtaaaccggtggacaccaaggggaaataccagttggcggaatcggttgaggtgagtgcgaacccagatccgacagaaggtcgtgtaaacgagctgcctcctactatgaaaaccgtttctccgtatgcgtgtcaacgccgcaccaccctgaacaaccgtaatcaacgttttacggactcgctggagattcttcgcgagaattacgtgtttaaaggcaacgacgatactgcgctggaatttcgtcgtgctatctccgtgctgaaaagccttccgtttgaggtacgtagcctgaaagacacggaaggattgccctggatcagtgatgaagtcaaagggattatggaagaaatcatcgaagtcggggagtcgcgtgaagtgcaggccgtgctcaatgatgagtggtatcaaagcttccacgcatttacgcgtgtctttggagtgggggtgaagacagcagacaagtggtaccgcatgggtctgcgcaccctggaggatgttcgttccagcaagaccctgaagctgaccacgtgggcgaaagtaggtctgacgtattatgaagatcttgctcgcggcgttacccgtgcggaagctgacgcgatttggctgctggttcaggatgcagtcgcaactttcgacccggatgcgatcgtggagattgtcggtggacagcgtcgtgggaaacctcagtctcacgacgttgatctgcttatcagttctccgggagctgaaaaagagcaagaagaccaactcctgcagaaagtgatgaatctgtggaagaaacaagggttgttgctgtgtggtaaactggtgtggagtcagtgggaatgggggggtctgccgtccggtaaggctgatgagggtgacggggaggcatcgtgctttctgatcctcaaactttatgatcatctggtgcgtaaaagtaaacgcaatatgccgactggttcgaacatgggcgagtccaaaccgtggaaagcaattaaagtagatctgctgcgttgcccccgcggcagttttgcgtttgcgatgttgcagtggaccggaagccgcatgttccgtcgcgatctgcgcgattacgcccgcgaagagaagaacatgatgctggacaatcatcaactgtatgacatgactcgtggtatccaactccctgctaaatcggaagaggaaattttcgaacatctggggcttgaatacctggaaccgttcgaacgtaacgca

SEQ ID NO: 5034 - protein, 529 aa, synthetic construct
  REGION 1..529: note = Variant of terminal deoxynucleotidyltransferase
MHHHHHHGGSGSHGIRTIDSDFGKKQQKKGDNHDSSATYEIKFHEFVLFILEEKMGATRRTFLTDLARKKGFRVENELTDEVTHIVAENLSRSEVLAWLKEHKMEKTKQFELLDISWLIESMKVGKPVDTKGKYQLAESVEVSANPDPTEGRVNELPPTMKTVSPYACQRRTTLNNRNQRFTDSLEILRENYVFKGNDDTALEFRRAISVLKSLPFEVRSLKDTEGLPWISDEVKGIMEEIIEVGESREVQAVLNDEWYQSFHAFTRVFGVGVKTADKWYRMGLRTLEDVRSSKTLKLTTWAKVGLTYYEDLARGVTRAEADAIWLLVQDAVATFDPDAIVEIVGGQRRGKPQSHDVDLLISSPGAEKEQEDQLLQKVMNLWKKQGLLLCGKLVWSQWEWGGLPSGKADEGDGEASCFLILKLYDHLVRKSKRNMPTGSNMGESKPWKAIKVDLLRCPRGSFAFAMLQWTGSRMFRRDLRDYAREEKNMMLDNHQLYDMTRGIQLPAKSEEEIFEHLGLEYLEPFERNA

SEQ ID NO: 5035 - DNA, 1587 bp, synthetic construct
  misc_feature 1..1587: note = Variant of terminal deoxynucleotidyltransferase
  source 1..1587: mol_type = other DNA
atgcaccatcatcatcatcatggcggtagcggcagccacggcattcgtaccatcgattcggacttcgggaagaaacagcagaaaaaaggcgataaccacgatagttccgccacttatgaaatcaaatttcacgagtttgtgctgttcattctcgaagaaaaaatgggtgcgacgcgtcgtacttttctgacagatttagcccgcaagaaagggttccgcgtcgagaatgaactgaccgacgaagttacccacatcgtggcagaaaatctgtcacgctctgaagtattggcttggctgaaagaacacaagatggagaagaccaagcaattcgaactgctggatattagctggcttatcgaaagcatgaaagttggtaaaccggtggacaccaaggggaaataccagttggcggaatcggttgaggtgagtgcgaacccagatccgacagaaggtcgtgtaaacgagctgcctcctactatgaaaaccgtttctccgtatgcgtgtcaacgccgcaccaccctgaacaaccgtaatcaacgttttacggactcgctggagattcttcgcgagaattacgtgtttaaaggcaacgacgatactgcgctggaatttcgtcgtgctatctccgtgctgaaaagccttccgtttgaggtacgtagcctgaaagacacggaaggattgccctggatcagtgatgaagtcaaagggattatggaagaaatcatcgaagtcggggagtcgcgtgaagtgcaggccgtgctcaatgatgagtggtatcaaagcttccacgcatttacgcgtgtctttggagtgggggtgaagacagcagacaagtggtaccgcatgggtctgcgcaccctggaggatgttcgttccagcaagaccctgaagctgaccacgtgggcgaaagtaggtctgacgtattatgaagatcttgctcgcggcgttacccgtgcggaagctgacgcgatttggctgctggttcaggatgcagtcgcaactttcgacccggatgcgatcgtggagattgtcggtggacagcgtcgtgggaaacctcagtctcacgacgttgatctgcttatcagttctccgggagctgaaaaagagcaagaagaccaactcctgcagaaagtgatgaatctgtggaagaaacaagggttgttgctgtgtggtcgtctggtgtggagtcagtgggaatgggggggtctgccgtccggtaaggctgatgagggtgacggggaggcatcgtgctttctgatcctcaaactttatgatcatctggtgcgtaaaagtaaacgcaatatgccgactggttcgaacatgggcgagtccaaaccgtggaaagcaattaaagtagatctgctgcgttgcccccgcggcagttttgcgtttgcgatgttgcagtggaccggaagccgcatgttccgtcgcgatctgcgcgattacgcccgcgaagagaagaacatggaactggacaatcattcgctgtatgacatgactcgtggtatccaactccctgctaaatcggaagaggaaattttcgaacatctggggcttgaatacctggaaccgttcgaacgtaacgca

SEQ ID NO: 5036 - protein, 529 aa, synthetic construct
  REGION 1..529: note = Variant of terminal deoxynucleotidyltransferase
MHHHHHHGGSGSHGIRTIDSDFGKKQQKKGDNHDSSATYEIKFHEFVLFILEEKMGATRRTFLTDLARKKGFRVENELTDEVTHIVAENLSRSEVLAWLKEHKMEKTKQFELLDISWLIESMKVGKPVDTKGKYQLAESVEVSANPDPTEGRVNELPPTMKTVSPYACQRRTTLNNRNQRFTDSLEILRENYVFKGNDDTALEFRRAISVLKSLPFEVRSLKDTEGLPWISDEVKGIMEEIIEVGESREVQAVLNDEWYQSFHAFTRVFGVGVKTADKWYRMGLRTLEDVRSSKTLKLTTWAKVGLTYYEDLARGVTRAEADAIWLLVQDAVATFDPDAIVEIVGGQRRGKPQSHDVDLLISSPGAEKEQEDQLLQKVMNLWKKQGLLLCGRLVWSQWEWGGLPSGKADEGDGEASCFLILKLYDHLVRKSKRNMPTGSNMGESKPWKAIKVDLLRCPRGSFAFAMLQWTGSRMFRRDLRDYAREEKNMELDNHSLYDMTRGIQLPAKSEEEIFEHLGLEYLEPFERNA

SEQ ID NO: 5037 - DNA, 1587 bp, synthetic construct
  misc_feature 1..1587: note = Variant of terminal deoxynucleotidyltransferase
  source 1..1587: mol_type = other DNA
atgcaccatcatcatcatcatggcggtagcggcagccacggcattcgtaccatcgattcggacttcgggaagaaacagcagaaaaaaggcgataaccacgatagttccgccacttatgaaatcaaatttcacgagtttgtgctgttcattctcgaagaaaaaatgggtgcgacgcgtcgtacttttctgacagatttagcccgcaagaaagggttccgcgtcgagaatgaactgaccgacgaagttacccacatcgtggcagaaaatctgtcacgctctgaagtattggcttggctgaaagaacacaagatggagaagaccaagcaattcgaactgctggatattagctggcttatcgaaagcatgaaagttggtaaaccggtggacaccaaggggaaataccagttggcggaatcggttgaggtgagtgcgaacccagatccgacagaaggtcgtgtaaacgagctgcctcctactatgaaaaccgtttctccgtatgcgtgtcaacgccgcaccaccctgaacaaccgtaatcaacgttttacggactcgctggagattcttcgcgagaattacgtgtttaaaggcaacgacgatactgcgctggaatttcgtcgtgctatctccgtgctgaaaagccttccgtttgaggtacgtagcctgaaagacacggaaggattgccctggatcagtgatgaagtcaaagggattatggaagaaatcatcgaagtcggggagtcgcgtgaagtgcaggccgtgctcaatgatgagtggtatcaaagcttccacgcatttacgcgtgtctttggagtgggggtgaagacagcagacaagtggtaccgcatgggtctgcgcaccctggaggatgttcgttccagcaagaccctgaagtttaccacgtgggcgaaagtaggtctgacgtattatgaagatcttgctcgcggcgttacccgtgcggaagctgacgcgatttggctgctggttcaggatgcagtcgcaactttcgacccggatgcgatcgtggagattgtcggtggacagcgtcgtgggaaacctcagtctcacgacgttgatctgcttatcagttctccgggagctgaaaaagagcaagaagaccaactcctgcagaaagtgatgaatctgtggaagaaacaagggttgttgctgtgtggtcgtgtggtgtatagtcagtgggaatgggggggtctgccgtccggtaaggctgatgagggtgacggggaggcatcgtgctttctgatcctcaaactttatgatcatctggtgcgtaaaagtaaacataatatgccgactggttcgaacatgggcgagtccaaaccgtggaaagcaattaaagtagatctgctgcgttgcccccgcggcagttttgcgtttgcgatgttgcagtggaccggaagccgcatgttccgtgtggatctgcgcgattacgcccgcgaagagaagaacatgatgctggacaatcattcgctgtatgacatgactcgtggtatccaactccctgctaaatcggaagaggaaattttcgaacatctggggcttgaatacctggaaccgttcgaacgtaacgca

SEQ ID NO: 5038 - protein, 529 aa, synthetic construct
  REGION 1..529: note = Variant of terminal deoxynucleotidyltransferase
MHHHHHHGGSGSHGIRTIDSDFGKKQQKKGDNHDSSATYEIKFHEFVLFILEEKMGATRRTFLTDLARKKGFRVENELTDEVTHIVAENLSRSEVLAWLKEHKMEKTKQFELLDISWLIESMKVGKPVDTKGKYQLAESVEVSANPDPTEGRVNELPPTMKTVSPYACQRRTTLNNRNQRFTDSLEILRENYVFKGNDDTALEFRRAISVLKSLPFEVRSLKDTEGLPWISDEVKGIMEEIIEVGESREVQAVLNDEWYQSFHAFTRVFGVGVKTADKWYRMGLRTLEDVRSSKTLKFTTWAKVGLTYYEDLARGVTRAEADAIWLLVQDAVATFDPDAIVEIVGGQRRGKPQSHDVDLLISSPGAEKEQEDQLLQKVMNLWKKQGLLLCGRVVYSQWEWGGLPSGKADEGDGEASCFLILKLYDHLVRKSKHNMPTGSNMGESKPWKAIKVDLLRCPRGSFAFAMLQWTGSRMFRVDLRDYAREEKNMMLDNHSLYDMTRGIQLPAKSEEEIFEHLGLEYLEPFERNA

SEQ ID NO: 5039 - DNA, 1587 bp, synthetic construct
  misc_feature 1..1587: note = Variant of terminal deoxynucleotidyltransferase
  source 1..1587: mol_type = other DNA
atgcaccatcatcatcatcatggcggtagcggcagccacggcattcgtaccatcgattcggacttcgggaagaaacagcagaaaaaaggcgataaccacgatagttccgccacttatgaaatcaaatttcacgagtttgtgctgttcattctcgaagaaaaaatgggtgcgacgcgtcgtacttttctgacagatttagcccgcaagaaagggttccgcgtcgagaatgaactgaccgacgaagttacccacatcgtggcagaaaatctgtcacgctctgaagtattggcttggctgaaagaacacaagatggagaagaccaagcaattcgaactgctggatattagctggcttatcgaaagcatgaaagttggtaaaccggtggacaccaaggggaaataccagttggcggaatcggttgaggtgagtgcgaacccagatccgacagaaggtcgtgtaaacgagctgcctcctactatgaaaaccgtttctccgtatgcgtgtcaacgccgcaccaccctgaacaaccgtaatcaacgttttacggactcgctggagattcttcgcgagaattacgtgtttaaaggcaacgacgatactgcgctggaatttcgtcgtgctatctccgtgctgaaaagccttccgtttgaggtacgtagcctgaaagacacggaaggattgccctggatcagtgatgaagtcaaagggattatggaagaaatcatcgaagtcggggagtcgcgtgaagtgcaggccgtgctcaatgatgagtggtatcaaagcttccacgcatttacgcgtgtctttggagtgggggtgaagacagcagacaagtggtaccgcatgggtctgcgcaccctggaggatgttcgttccagcaagaccctgaagttgaccacgtgggcgaaagtaggtctgacgtattatgaagatcttgctcgcggcgttacccgtgcggaagctgacgcgatttggctgctggttcaggatgcagtcgcaactttcgacccggatgcgatcgtggagattgtcggtggacagcgtcgtgggaaacctcagtctcacgacgttgatctgcttatcagttctccgggagctgaaaaagagcaagaagaccaactcctgcagaaagtgatgaatctgtggaagaaacaagggttgttgctgtgtggtcgtctggtgtggagtcagtgggaatgggggggtctgccgtccggtaaggctgatgagggtgacggggaggcatcgtgctttctgatcctcaaactttatgatcatctggtgcgtaaaagtaaacgcaatatgccgactggttcgaacatgggcgagtccaaaccgtggaaagcaattaaagtagatctgctgcgttgcccccgcggcagttttgcgtttgcgatgttgcagtggaccggaagccgcatgttccgtgtggatctgcgcgattacgcccgcgaagagaagaacatgatgctggacaatcatagcctgtatgacatgactcgtggtatccaactccctgctaaatcggaagaggaaattttcgaacatctggggcttgaatacctggaaccgttcgaacgtaacgca

SEQ ID NO: 5040 - protein, 529 aa, synthetic construct
  REGION 1..529: note = Variant of terminal deoxynucleotidyltransferase
MHHHHHHGGSGSHGIRTIDSDFGKKQQKKGDNHDSSATYEIKFHEFVLFILEEKMGATRRTFLTDLARKKGFRVENELTDEVTHIVAENLSRSEVLAWLKEHKMEKTKQFELLDISWLIESMKVGKPVDTKGKYQLAESVEVSANPDPTEGRVNELPPTMKTVSPYACQRRTTLNNRNQRFTDSLEILRENYVFKGNDDTALEFRRAISVLKSLPFEVRSLKDTEGLPWISDEVKGIMEEIIEVGESREVQAVLNDEWYQSFHAFTRVFGVGVKTADKWYRMGLRTLEDVRSSKTLKLTTWAKVGLTYYEDLARGVTRAEADAIWLLVQDAVATFDPDAIVEIVGGQRRGKPQSHDVDLLISSPGAEKEQEDQLLQKVMNLWKKQGLLLCGRLVWSQWEWGGLPSGKADEGDGEASCFLILKLYDHLVRKSKRNMPTGSNMGESKPWKAIKVDLLRCPRGSFAFAMLQWTGSRMFRVDLRDYAREEKNMMLDNHSLYDMTRGIQLPAKSEEEIFEHLGLEYLEPFERNA

SEQ ID NO: 5041 - DNA, 1587 bp, synthetic construct
  misc_feature 1..1587: note = Variant of terminal deoxynucleotidyltransferase
  source 1..1587: mol_type = other DNA
atgcaccatcatcatcatcatggcggtagcggcagccacggcattcgtaccatcgattcggacttcgggaagaaacagcagaaaaaaggcgataaccacgatagttccgccacttatgaaatcaaatttcacgagtttgtgctgttcattctcgaagaaaaaatgggtgcgacgcgtcgtacttttctgacagatttagcccgcaagaaagggttccgcgtcgagaatgaactgaccgacgaagttacccacatcgtggcagaaaatctgtcacgctctgaagtattggcttggctgaaagaacacaagatggagaagaccaagcaattcgaactgctggatattagctggcttatcgaaagcatgaaagttggtaaaccggtggacaccaaggggaaataccagttggcggaatcggttgaggtgagtgcgaacccagatccgacagaaggtcgtgtaaacgagctgcctcctactatgaaaaccgtttctccgtatgcgtgtcaacgccgcaccaccctgaacaaccgtaatcaacgttttacggactcgctggagattcttcgcgagaattacgtgtttaaaggcaacgacgatactgcgctggaatttcgtcgtgctatctccgtgctgaaaagccttccgtttgaggtacgtagcctgaaagacacggaaggattgccctggatcagtgatgaagtcaaagggattatggaagaaatcatcgaagtcggggagtcgcgtgaagtgcaggccgtgctcaatgatgagtggtatcaaagcttccacgcatttacgcgtgtctttggagtgggggtgaagacagcagacaagtggtaccgcatgggtctgcgcaccctggaggatgttcgttccagcaagaccctgaagtttaccacgtgggcgaaagtaggtctgacgtattatgaagatcttgctcgcggcgttacccgtgcggaagctgacgcgatttggctgctggttcaggatgcagtcgcaactttcgacccggatgcgatcgtggagattgtcggtggacagcgtcgtgggaaacctcagtctcacgacgttgatctgcttatcagttctccgggagctgaaaaagagcaagaagaccaactcctgcagaaagtgatgaatctgtggaagaaacaagggttgttgctgtgtggtcgtctggtgtggagtcagtgggaatgggggggtctgccgtccggtaaggctgatgagggtgacggggaggcatcgtgctttctgatcctcaaactttatgatcatctggtgcgtaaaagtaaacataatatgccgactggttcgaacatgggcgagtccaaaccgtggaaagcaattaaagtagatctgctgcgttgcccccgcggcagttttgcgtttgcgatgttgcagtggaccggaagccgcatgttccgtcgcgatctgcgcgattacgcccgcgaagagaagaacatgatgctggacaatcatagcctgtatgacatgactcgtggtatccaactccctgctaaatcggaagaggaaattttcgaacatctggggcttgaatacctggaaccgttcgaacgtaacgca

SEQ ID NO: 5042 - protein, 529 aa, synthetic construct
  REGION 1..529: note = Variant of terminal deoxynucleotidyltransferase
MHHHHHHGGSGSHGIRTIDSDFGKKQQKKGDNHDSSATYEIKFHEFVLFILEEKMGATRRTFLTDLARKKGFRVENELTDEVTHIVAENLSRSEVLAWLKEHKMEKTKQFELLDISWLIESMKVGKPVDTKGKYQLAESVEVSANPDPTEGRVNELPPTMKTVSPYACQRRTTLNNRNQRFTDSLEILRENYVFKGNDDTALEFRRAISVLKSLPFEVRSLKDTEGLPWISDEVKGIMEEIIEVGESREVQAVLNDEWYQSFHAFTRVFGVGVKTADKWYRMGLRTLEDVRSSKTLKFTTWAKVGLTYYEDLARGVTRAEADAIWLLVQDAVATFDPDAIVEIVGGQRRGKPQSHDVDLLISSPGAEKEQEDQLLQKVMNLWKKQGLLLCGRLVWSQWEWGGLPSGKADEGDGEASCFLILKLYDHLVRKSKHNMPTGSNMGESKPWKAIKVDLLRCPRGSFAFAMLQWTGSRMFRRDLRDYAREEKNMMLDNHSLYDMTRGIQLPAKSEEEIFEHLGLEYLEPFERNA

SEQ ID NO: 5043 - DNA, 1587 bp, synthetic construct
  misc_feature 1..1587: note = Variant of terminal deoxynucleotidyltransferase
  source 1..1587: mol_type = other DNA
atgcaccatcatcatcatcatggcggtagcggcagccacggcattcgtaccatcgattcggacttcgggaagaaacagcagaaaaaaggcgataaccacgatagttccgccacttatgaaatcaaatttcacgagtttgtgctgttcattctcgaagaaaaaatgggtgcgacgcgtcgtacttttctgacagatttagcccgcaagaaagggttccgcgtcgagaatgaactgaccgacgaagttacccacatcgtggcagaaaatctgtcacgctctgaagtattggcttggctgaaagaacacaagatggagaagaccaagcaattcgaactgctggatattagctggcttatcgaaagcatgaaagttggtaaaccggtggacaccaaggggaaataccagttggcggaatcggttgaggtgagtgcgaacccagatccgacagaaggtcgtgtaaacgagctgcctcctactatgaaaaccgtttctccgtatgcgtgtcaacgccgcaccaccctgaacaaccgtaatcaacgttttacggactcgctggagattcttcgcgagaattacgtgtttaaaggcaacgacgatactgcgctggaatttcgtcgtgctatctccgtgctgaaaagccttccgtttgaggtacgtagcctgaaagacacggaaggattgccctggatcagtgatgaagtcaaagggattatggaagaaatcatcgaagtcggggagtcgcgtgaagtgcaggccgtgctcaatgatgagtggtatcaaagcttccacgcatttacgcgtgtctttggagtgggggtgaagacagcagacaagtggtaccgcatgggtctgcgcaccctggaggatgttcgttccagcaagaccctgaagctgaccacgtgggcgaaagtaggtctgacgtattatgaagatcttgctcgcggcgttacccgtgcggaagctgacgcgatttggctgctggttcaggatgcagtcgcaactttcgacccggatgcgatcgtggagattgtcggtggacagcgtcgtgggaaacctcagtctcacgacgttgatctgcttatcagttctccgggagctgaaaaagagcaagaagaccaactcctgcagaaagtgatgaatctgtggaagaaacaagggttgttgctgtgtggtcatctggcgtggagtcagtgggaatgggggggtctgccgtccggtaaggctgatgagggtgacggggaggcatcgtgctttctgatcctcaaactttatgatcatctggtgcgtaaaagtaaacataatatgccgactggttcgaacatgggcgagtccaaaccgtggaaagcaattaaagtagatctgctgcgttgcccccgcggcagttttgcgtttgcgatgttgcagtggaccggaagccgcatgttccgtctggatctgcgcgattacgcccgcgaagagaagaacatgatgctggacaatcatagcctgtatgacatgactcgtggtatccaactccctgctaaatcggaagaggaaattttcgaacatctggggcttgaatacctggaaccgttcgaacgtaacgca

SEQ ID NO: 5044 - protein, 529 aa, synthetic construct
  REGION 1..529: note = Variant of terminal deoxynucleotidyltransferase
MHHHHHHGGSGSHGIRTIDSDFGKKQQKKGDNHDSSATYEIKFHEFVLFILEEKMGATRRTFLTDLARKKGFRVENELTDEVTHIVAENLSRSEVLAWLKEHKMEKTKQFELLDISWLIESMKVGKPVDTKGKYQLAESVEVSANPDPTEGRVNELPPTMKTVSPYACQRRTTLNNRNQRFTDSLEILRENYVFKGNDDTALEFRRAISVLKSLPFEVRSLKDTEGLPWISDEVKGIMEEIIEVGESREVQAVLNDEWYQSFHAFTRVFGVGVKTADKWYRMGLRTLEDVRSSKTLKLTTWAKVGLTYYEDLARGVTRAEADAIWLLVQDAVATFDPDAIVEIVGGQRRGKPQSHDVDLLISSPGAEKEQEDQLLQKVMNLWKKQGLLLCGHLAWSQWEWGGLPSGKADEGDGEASCFLILKLYDHLVRKSKHNMPTGSNMGESKPWKAIKVDLLRCPRGSFAFAMLQWTGSRMFRLDLRDYAREEKNMMLDNHSLYDMTRGIQLPAKSEEEIFEHLGLEYLEPFERNA

SEQ ID NO: 5045 - DNA, 1587 bp, synthetic construct
  misc_feature 1..1587: note = Variant of terminal deoxynucleotidyltransferase
  source 1..1587: mol_type = other DNA
atgcaccatcatcatcatcatggcggtagcggcagccacggcattcgtaccatcgattcggacttcgggaagaaacagcagaaaaaaggcgataaccacgatagttccgccacttatgaaatcaaatttcacgagtttgtgctgttcattctcgaagaaaaaatgggtgcgacgcgtcgtacttttctgacagatttagcccgcaagaaagggttccgcgtcgagaatgaactgaccgacgaagttacccacatcgtggcagaaaatctgtcacgctctgaagtattggcttggctgaaagaacacaagatggagaagaccaagcaattcgaactgctggatattagctggcttatcgaaagcatgaaagttggtaaaccggtggacaccaaggggaaataccagttggcggaatcggttgaggtgagtgcgaacccagatccgacagaaggtcgtgtaaacgagctgcctcctactatgaaaaccgtttctccgtatgcgtgtcaacgccgcaccaccctgaacaaccgtaatcaacgttttacggactcgctggagattcttcgcgagaattacgtgtttaaaggcaacgacgatactgcgctggaatttcgtcgtgctatctccgtgctgaaaagccttccgtttgaggtacgtagcctgaaagacacggaaggattgccctggatcagtgatgaagtcaaagggattatggaagaaatcatcgaagtcggggagtcgcgtgaagtgcaggccgtgctcaatgatgagtggtatcaaagcttccacgcatttacgcgtgtctttggagtgggggtgaagacagcagacaagtggtaccgcatgggtctgcgcaccctggaggatgttcgttccagcaagaccctgaagtttaccacgtgggcgaaagtaggtctgacgtattatgaagatcttgctcgcggcgttacccgtgcggaagctgacgcgatttggctgctggttcaggatgcagtcgcaactttcgacccggatgcgatcgtggagattgtcggtggacagcgtcgtgggaaacctcagtctcacgacgttgatctgcttatcagttctccgggagctgaaaaagagcaagaagaccaactcctgcagaaagtgatgaatctgtggaagaaacaagggttgttgctgtgtggtaaagtggtgtggagtcagtgggaatgggggggtctgccgtccggtaaggctgatgagggtgacggggaggcatcgtgctttctgatcctcaaactttatgatcatctggtgcgtaaaagtaaacgcaatatgccgactggttcgaacatgggcgagtccaaaccgtggaaagcaattaaagtagatctgctgcgttgcccccgcggcagttttgcgtttgcgatgttgcagtggaccggaagccgcatgttccgtcgcgatctgcgcgattacgcccgcgaagagaagaacatgatgctggacaatcatagcctgtatgacatgactcgtggtatccaactccctgctaaatcggaagaggaaattttcgaacatctggggcttgaatacctggaaccgttcgaacgtaacgca

SEQ ID NO: 5046 - protein, 529 aa, synthetic construct
  REGION 1..529: note = Variant of terminal deoxynucleotidyltransferase
MHHHHHHGGSGSHGIRTIDSDFGKKQQKKGDNHDSSATYEIKFHEFVLFILEEKMGATRRTFLTDLARKKGFRVENELTDEVTHIVAENLSRSEVLAWLKEHKMEKTKQFELLDISWLIESMKVGKPVDTKGKYQLAESVEVSANPDPTEGRVNELPPTMKTVSPYACQRRTTLNNRNQRFTDSLEILRENYVFKGNDDTALEFRRAISVLKSLPFEVRSLKDTEGLPWISDEVKGIMEEIIEVGESREVQAVLNDEWYQSFHAFTRVFGVGVKTADKWYRMGLRTLEDVRSSKTLKFTTWAKVGLTYYEDLARGVTRAEADAIWLLVQDAVATFDPDAIVEIVGGQRRGKPQSHDVDLLISSPGAEKEQEDQLLQKVMNLWKKQGLLLCGKVVWSQWEWGGLPSGKADEGDGEASCFLILKLYDHLVRKSKRNMPTGSNMGESKPWKAIKVDLLRCPRGSFAFAMLQWTGSRMFRRDLRDYAREEKNMMLDNHSLYDMTRGIQLPAKSEEEIFEHLGLEYLEPFERNA

SEQ ID NO: 5047 - DNA, 1587 bp, synthetic construct
  misc_feature 1..1587: note = Variant of terminal deoxynucleotidyltransferase
  source 1..1587: mol_type = other DNA
atgcaccatcatcatcatcatggcggtagcggcagccacggcattcgtaccatcgattcggacttcgggaagaaacagcagaaaaaaggcgataaccacgatagttccgccacttatgaaatcaaatttcacgagtttgtgctgttcattctcgaagaaaaaatgggtgcgacgcgtcgtacttttctgacagatttagcccgcaagaaagggttccgcgtcgagaatgaactgaccgacgaagttacccacatcgtggcagaaaatctgtcacgctctgaagtattggcttggctgaaagaacacaagatggagaagaccaagcaattcgaactgctggatattagctggcttatcgaaagcatgaaagttggtaaaccggtggacaccaaggggaaataccagttggcggaatcggttgaggtgagtgcgaacccagatccgacagaaggtcgtgtaaacgagctgcctcctactatgaaaaccgtttctccgtatgcgtgtcaacgccgcaccaccctgaacaaccgtaatcaacgttttacggactcgctggagattcttcgcgagaattacgtgtttaaaggcaacgacgatactgcgctggaatttcgtcgtgctatctccgtgctgaaaagccttccgtttgaggtacgtagcctgaaagacacggaaggattgccctggatcagtgatgaagtcaaagggattatggaagaaatcatcgaagtcggggagtcgcgtgaagtgcaggccgtgctcaatgatgagtggtatcaaagcttccacgcatttacgcgtgtctttggagtgggggtgaagacagcagacaagtggtaccgcatgggtctgcgcaccctggaggatgttcgttccagcaagaccctgaagttgaccacgtgggcgaaagtaggtctgacgtattatgaagatcttgctcgcggcgttacccgtgcggaagctgacgcgatttggctgctggttcaggatgcagtcgcaactttcgacccggatgcgatcgtggagattgtcggtggacagcgtcgtgggaaacctcagtctcacgacgttgatctgcttatcagttctccgggagctgaaaaagagcaagaagaccaactcctgcagaaagtgatgaatctgtggaagaaacaagggttgttgctgtgtggtcatgtggtgtggagtcagtgggaatgggggggtctgccgtccggtaaggctgatgagggtgacggggaggcatcgtgctttctgatcctcaaactttatgatcatctggtgcgtaaaagtaaacgcaatatgccgactggttcgaacatgggcgagtccaaaccgtggaaagcaattaaagtagatctgctgcgttgcccccgcggcagttttgcgtttgcgatgttgcagtggaccggaagccgcatgttccgtcgcgatctgcgcgattacgcccgcgaagagaagaacatggaactggacaatcattcgctgtatgacatgactcgtggtatccaactccctgctaaatcggaagaggaaattttcgaacatctggggcttgaatacctggaaccgttcgaacgtaacgca

SEQ ID NO: 5048 - protein, 529 aa, synthetic construct
  REGION 1..529: note = Variant of terminal deoxynucleotidyltransferase
MHHHHHHGGSGSHGIRTIDSDFGKKQQKKGDNHDSSATYEIKFHEFVLFILEEKMGATRRTFLTDLARKKGFRVENELTDEVTHIVAENLSRSEVLAWLKEHKMEKTKQFELLDISWLIESMKVGKPVDTKGKYQLAESVEVSANPDPTEGRVNELPPTMKTVSPYACQRRTTLNNRNQRFTDSLEILRENYVFKGNDDTALEFRRAISVLKSLPFEVRSLKDTEGLPWISDEVKGIMEEIIEVGESREVQAVLNDEWYQSFHAFTRVFGVGVKTADKWYRMGLRTLEDVRSSKTLKLTTWAKVGLTYYEDLARGVTRAEADAIWLLVQDAVATFDPDAIVEIVGGQRRGKPQSHDVDLLISSPGAEKEQEDQLLQKVMNLWKKQGLLLCGHVVWSQWEWGGLPSGKADEGDGEASCFLILKLYDHLVRKSKRNMPTGSNMGESKPWKAIKVDLLRCPRGSFAFAMLQWTGSRMFRRDLRDYAREEKNMELDNHSLYDMTRGIQLPAKSEEEIFEHLGLEYLEPFERNA

SEQ ID NO: 5049 - DNA, 1587 bp, synthetic construct
  misc_feature 1..1587: note = Variant of terminal deoxynucleotidyltransferase
  source 1..1587: mol_type = other DNA
atgcaccatcatcatcatcatggcggtagcggcagccacggcattcgtaccatcgattcggacttcgggaagaaacagcagaaaaaaggcgataaccacgatagttccgccacttatgaaatcaaatttcacgagtttgtgctgttcattctcgaagaaaaaatgggtgcgacgcgtcgtacttttctgacagatttagcccgcaagaaagggttccgcgtcgagaatgaactgaccgacgaagttacccacatcgtggcagaaaatctgtcacgctctgaagtattggcttggctgaaagaacacaagatggagaagaccaagcaattcgaactgctggatattagctggcttatcgaaagcatgaaagttggtaaaccggtggacaccaaggggaaataccagttggcggaatcggttgaggtgagtgcgaacccagatccgacagaaggtcgtgtaaacgagctgcctcctactatgaaaaccgtttctccgtatgcgtgtcaacgccgcaccaccctgaacaaccgtaatcaacgttttacggactcgctggagattcttcgcgagaattacgtgtttaaaggcaacgacgatactgcgctggaatttcgtcgtgctatctccgtgctgaaaagccttccgtttgaggtacgtagcctgaaagacacggaaggattgccctggatcagtgatgaagtcaaagggattatggaagaaatcatcgaagtcggggagtcgcgtgaagtgcaggccgtgctcaatgatgagtggtatcaaagcttccacgcatttacgcgtgtctttggagtgggggtgaagacagcagacaagtggtaccgcatgggtctgcgcaccctggaggatgttcgttccagcaagaccctgaagttgaccacgtgggcgaaagtaggtctgacgtattatgaagatcttgctcgcggcgttacccgtgcggaagctgacgcgatttggctgctggttcaggatgcagtcgcaactttcgacccggatgcgatcgtggagattgtcggtggacagcgtcgtgggaaacctcagtctcacgacgttgatctgcttatcagttctccgggagctgaaaaagagcaagaagaccaactcctgcagaaagtgatgaatctgtggaagaaacaagggttgttgctgtgtggtaaagtggtgtggagtcagtgggaatgggggggtctgccgtccggtaaggctgatgagggtgacggggaggcatcgtgctttctgatcctcaaactttatgatcatctggtgcgtaaaagtaaacgcaatatgccgactggttcgaacatgggcgagtccaaaccgtggaaagcaattaaagtagatctgctgcgttgcccccgcggcagttttgcgtttgcgatgttgcagtggaccggaagccgcatgttccgtgtggatctgcgcgattacgcccgcgaagagaagaacatgatgctggacaatcatcaactgtatgacatgactcgtggtatccaactccctgctaaatcggaagaggaaattttcgaacatctggggcttgaatacctggaaccgttcgaacgtaacgca

SEQ ID NO: 5050 - protein, 529 aa, synthetic construct
  REGION 1..529: note = Variant of terminal deoxynucleotidyltransferase
MHHHHHHGGSGSHGIRTIDSDFGKKQQKKGDNHDSSATYEIKFHEFVLFILEEKMGATRRTFLTDLARKKGFRVENELTDEVTHIVAENLSRSEVLAWLKEHKMEKTKQFELLDISWLIESMKVGKPVDTKGKYQLAESVEVSANPDPTEGRVNELPPTMKTVSPYACQRRTTLNNRNQRFTDSLEILRENYVFKGNDDTALEFRRAISVLKSLPFEVRSLKDTEGLPWISDEVKGIMEEIIEVGESREVQAVLNDEWYQSFHAFTRVFGVGVKTADKWYRMGLRTLEDVRSSKTLKLTTWAKVGLTYYEDLARGVTRAEADAIWLLVQDAVATFDPDAIVEIVGGQRRGKPQSHDVDLLISSPGAEKEQEDQLLQKVMNLWKKQGLLLCGKVVWSQWEWGGLPSGKADEGDGEASCFLILKLYDHLVRKSKRNMPTGSNMGESKPWKAIKVDLLRCPRGSFAFAMLQWTGSRMFRVDLRDYAREEKNMMLDNHQLYDMTRGIQLPAKSEEEIFEHLGLEYLEPFERNA

SEQ ID NO: 5051 - DNA, 1587 bp, synthetic construct
  misc_feature 1..1587: note = Variant of terminal deoxynucleotidyltransferase
  source 1..1587: mol_type = other DNA
atgcaccatcatcatcatcatggcggtagcggcagccacggcattcgtaccatcgattcggacttcgggaagaaacagcagaaaaaaggcgataaccacgatagttccgccacttatgaaatcaaatttcacgagtttgtgctgttcattctcgaagaaaaaatgggtgcgacgcgtcgtacttttctgacagatttagcccgcaagaaagggttccgcgtcgagaatgaactgaccgacgaagttacccacatcgtggcagaaaatctgtcacgctctgaagtattggcttggctgaaagaacacaagatggagaagaccaagcaattcgaactgctggatattagctggcttatcgaaagcatgaaagttggtaaaccggtggacaccaaggggaaataccagttggcggaatcggttgaggtgagtgcgaacccagatccgacagaaggtcgtgtaaacgagctgcctcctactatgaaaaccgtttctccgtatgcgtgtcaacgccgcaccaccctgaacaaccgtaatcaacgttttacggactcgctggagattcttcgcgaaaattacgtgtggaaaggcaacgacgatactgcgctggaatttcgtcgtgctatctccgtgctgaaaagccttccgtttgaggtacgtagcctgaaagacacggaaggattgccctggatcagtgatgaagtcaaagggattatggaagaaatcatcgaagtcggggagtcgcgtgaagtgcaggccgtgctcaatgatgagtggtatcaaagcttccacgcatttacgcgtgtctttggagtgggggtgaagacagcagacaagtggtaccgcatgggtctgcgcaccctggaggatgttcgttccagcaagaccctgaagttgaccacgtgggcgaaagtaggtctgacgtattatgaagatcttgctcgcggcgttacccgtgcggaagctgacgcgatttggctgctggttcaggatgcagtcgcaactttcgacccggatgcgatcgtggagattgtcggtggacagcgtcgtgggaaacctcagtctcacgacgttgatctgcttatcagttctccgggagctgaaaaagagcaagaagaccaactcctgcagaaagtgatgaatctgtggaagaaacaagggttgttgctgtgtggtcgtctggaatggagtcagtgggaatgggggggtctgccgtccggtaaggctgatgagggtgacggggaggcatcgtgctttctgatcctcaaactttatgatcatctggtgcgtaaaagtaaacgcaatatgccgactggttcgaacatgggcgagtccaaaccgtggaaagcaattaaagtagatctgctgcgttgcccccgcggcagttttgcgtttgcgatgttgcagtggaccggaagccgcatgttccgtcgtgatctgcgcgattacgcccgcgaagagaagaacatgatgctggacaatcatagcctgtatgacatgactcgtggtatccaactccctgctaaatcggaagaggaaattttcgaacatctggggcttgaatacctggaaccgttcgaacgtaacgca

SEQ ID NO: 5052 - protein, 529 aa, synthetic construct
  REGION 1..529: note = Variant of terminal deoxynucleotidyltransferase
MHHHHHHGGSGSHGIRTIDSDFGKKQQKKGDNHDSSATYEIKFHEFVLFILEEKMGATRRTFLTDLARKKGFRVENELTDEVTHIVAENLSRSEVLAWLKEHKMEKTKQFELLDISWLIESMKVGKPVDTKGKYQLAESVEVSANPDPTEGRVNELPPTMKTVSPYACQRRTTLNNRNQRFTDSLEILRENYVWKGNDDTALEFRRAISVLKSLPFEVRSLKDTEGLPWISDEVKGIMEEIIEVGESREVQAVLNDEWYQSFHAFTRVFGVGVKTADKWYRMGLRTLEDVRSSKTLKLTTWAKVGLTYYEDLARGVTRAEADAIWLLVQDAVATFDPDAIVEIVGGQRRGKPQSHDVDLLISSPGAEKEQEDQLLQKVMNLWKKQGLLLCGRLEWSQWEWGGLPSGKADEGDGEASCFLILKLYDHLVRKSKRNMPTGSNMGESKPWKAIKVDLLRCPRGSFAFAMLQWTGSRMFRRDLRDYAREEKNMMLDNHSLYDMTRGIQLPAKSEEEIFEHLGLEYLEPFERNA

SEQ ID NO: 5053 - DNA, 1587 bp, synthetic construct
  misc_feature 1..1587: note = Variant of terminal deoxynucleotidyltransferase
  source 1..1587: mol_type = other DNA
atgcaccatcatcatcatcatggcggtagcggcagccacggcattcgtaccatcgattcggacttcgggaagaaacagcagaaaaaaggcgataaccacgatagttccgccacttatgaaatcaaatttcacgagtttgtgctgttcattctcgaagaaaaaatgggtgcgacgcgtcgtacttttctgacagatttagcccgcaagaaagggttccgcgtcgagaatgaactgaccgacgaagttacccacatcgtggcagaaaatctgtcacgctctgaagtattggcttggctgaaagaacacaagatggagaagaccaagcaattcgaactgctggatattagctggcttatcgaaagcatgaaagttggtaaaccggtggacaccaaggggaaataccagttggcggaatcggttgaggtgagtgcgaacccagatccgacagaaggtcgtgtaaacgagctgcctcctactatgaaaaccgtttctccgtatgcgtgtcaacgccgcaccaccctgaacaaccgtaatcaacgttttacggactcgctggagattcttcgcgagaattacgtgtttaaaggcaacgacgatactgcgctggaatttcgtcgtgctatctccgtgctgaaaagccttccgtttgaggtacgtagcctgaaagacacggaaggattgccctggatcagtgatgaagtcaaagggattatggaagaaatcatcgaagtcggggagtcgcgtgaagtgcaggccgtgctcaatgatgagtggtatcaaagcttccacgcatttacgcgtgtctttggagtgggggtgaagacagcagacaagtggtaccgcatgggtctgcgcaccctggaggatgttcgttccagcaagaccctgaagttgaccacgtgggcgaaagtaggtctgacgtattatgaagatcttgctcgcggcgttacccgtgcggaagctgacgcgatgtggctgctggttcaggatgcagtcgcaactttcgacccggatgcgatcgtggagattgtcggtggacagcgtcgtgggaaacctcagtctcacgacgttgatctgcttatcagttctccgggagctgaaaaagagcaagaagaccaactcctgcagaaagtgatgaatctgtggaagaaacaagggttgttgctgtgtggtcgtctggaatggagtcagtgggaatgggggggtctgccgtccggtaaggctgatgagggtgacggggaggcatcgtgctttctgatcctcaaactttatgatcatctggtgcgtaaaagtaaacgcaatatgccgactggttcgaacatgggcgagtccaaaccgtggaaagcaattaaagtagatctgctgcgttgcccccgcggcagttttgcgtttgcgatgttgcagtggaccggaagccgcatgttccgtcgtgatctgcgcgattacgcccgcgaagagaagaacatgatgctggacaatcatagcctgtatgacatgactcgtggtatccaactccctgctaaatcggaagaggaaattttcgaacatctggggcttgaatacctggaaccgttcgaacgtaacgca

SEQ ID NO: 5054 - protein, 529 aa, synthetic construct
  REGION 1..529: note = Variant of terminal deoxynucleotidyltransferase
MHHHHHHGGSGSHGIRTIDSDFGKKQQKKGDNHDSSATYEIKFHEFVLFILEEKMGATRRTFLTDLARKKGFRVENELTDEVTHIVAENLSRSEVLAWLKEHKMEKTKQFELLDISWLIESMKVGKPVDTKGKYQLAESVEVSANPDPTEGRVNELPPTMKTVSPYACQRRTTLNNRNQRFTDSLEILRENYVFKGNDDTALEFRRAISVLKSLPFEVRSLKDTEGLPWISDEVKGIMEEIIEVGESREVQAVLNDEWYQSFHAFTRVFGVGVKTADKWYRMGLRTLEDVRSSKTLKLTTWAKVGLTYYEDLARGVTRAEADAMWLLVQDAVATFDPDAIVEIVGGQRRGKPQSHDVDLLISSPGAEKEQEDQLLQKVMNLWKKQGLLLCGRLEWSQWEWGGLPSGKADEGDGEASCFLILKLYDHLVRKSKRNMPTGSNMGESKPWKAIKVDLLRCPRGSFAFAMLQWTGSRMFRRDLRDYAREEKNMMLDNHSLYDMTRGIQLPAKSEEEIFEHLGLEYLEPFERNA

SEQ ID NO: 5055 - DNA, 1587 bp, synthetic construct
  misc_feature 1..1587: note = Variant of terminal deoxynucleotidyltransferase
  source 1..1587: mol_type = other DNA
atgcaccatcatcatcatcatggcggtagcggcagccacggcattcgtaccatcgattcggacttcgggaagaaacagcagaaaaaaggcgataaccacgatagttccgccacttatgaaatcaaatttcacgagtttgtgctgttcattctcgaagaaaaaatgggtgcgacgcgtcgtacttttctgacagatttagcccgcaagaaagggttccgcgtcgagaatgaactgaccgacgaagttacccacatcgtggcagaaaatctgtcacgctctgaagtattggcttggctgaaagaacacaagatggagaagaccaagcaattcgaactgctggatattagctggcttatcgaaagcatgaaagttggtaaaccggtggacaccaaggggaaataccagttggcggaatcggttgaggtgagtgcgaacccagatccgacagaaggtcgtgtaaacgagctgcctcctactatgaaaaccgtttctccgtatgcgtgtcaacgccgcaccaccctgaacaaccgtaatcaacgttttacggactcgctggagattcttcgcgagaattacgtgtttaaaggcaacgacgatactgcgctggaatttcgtcgtgctatctccgtgctgaaaagccttccgtttgaggtacgtagcctgaaagacacggaaggattgccctggatcagtgatgaagtcaaagggattatggaagaaatcatcgaagtcggggagtcgcgtgaagtgcaggccgtgctcaatgatgagtggtatcaaagcttccacgcatttacgcgtgtctttggagtgggggtgaagacagcagacaagtggtaccgcatgggtctgcgcaccctggaggatgttcgttccagcaagaccctgaagttgaccacgtgggcgaaagtaggtctgacgtatcgggaagatcttgctcgcggcgttacccgtgcggaagctgacgcgatttggctgctggttcaggatgcagtcgcaactttcgacccggatgcgatcgtggagattgtcggtggacagcgtcgtgggaaacctcagtctcacgacgttgatctgcttatcagttctccgggagctgaaaaagagcaagaagaccaactcctgcagaaagtgatgaatctgtggaagaaacaagggttgttgctgtgtggtcgtctggaatggagtcagtgggaatgggggggtctgccgtccggtaaggctgatgagggtgacggggaggcatcgtgctttctgatcctcaaactttatgatcatctggtgcgtaaaagtaaacgcaatatgccgactggttcgaacatgggcgagtccaaaccgtggaaagcaattaaagtagatctgctgcgttgcccccgcggcagttttgcgtttgcgatgttgcagtggaccggaagccgcatgttccgtcgtgatctgcgcgattacgcccgcgaagagaagaacatgatgctggacaatcatagcctgtatgacatgactcgtggtatccaactccctgctaaatcggaagaggaaattttcgaacatctggggcttgaatacctggaaccgttcgaacgtaacgca

SEQ ID NO: 5056 - protein, 529 aa, synthetic construct
  REGION 1..529: note = Variant of terminal deoxynucleotidyltransferase
MHHHHHHGGSGSHGIRTIDSDFGKKQQKKGDNHDSSATYEIKFHEFVLFILEEKMGATRRTFLTDLARKKGFRVENELTDEVTHIVAENLSRSEVLAWLKEHKMEKTKQFELLDISWLIESMKVGKPVDTKGKYQLAESVEVSANPDPTEGRVNELPPTMKTVSPYACQRRTTLNNRNQRFTDSLEILRENYVFKGNDDTALEFRRAISVLKSLPFEVRSLKDTEGLPWISDEVKGIMEEIIEVGESREVQAVLNDEWYQSFHAFTRVFGVGVKTADKWYRMGLRTLEDVRSSKTLKLTTWAKVGLTYREDLARGVTRAEADAIWLLVQDAVATFDPDAIVEIVGGQRRGKPQSHDVDLLISSPGAEKEQEDQLLQKVMNLWKKQGLLLCGRLEWSQWEWGGLPSGKADEGDGEASCFLILKLYDHLVRKSKRNMPTGSNMGESKPWKAIKVDLLRCPRGSFAFAMLQWTGSRMFRRDLRDYAREEKNMMLDNHSLYDMTRGIQLPAKSEEEIFEHLGLEYLEPFERNA

SEQ ID NO: 5057 - DNA, 1587 bp, synthetic construct
  misc_feature 1..1587: note = Variant of terminal deoxynucleotidyltransferase
  source 1..1587: mol_type = other DNA
atgcaccatcatcatcatcatggcggtagcggcagccacggcattcgtaccatcgattcggacttcgggaagaaacagcagaaaaaaggcgataaccacgatagttccgccacttatgaaatcaaatttcacgagtttgtgctgttcattctcgaagaaaaaatgggtgcgacgcgtcgtacttttctgacagatttagcccgcaagaaagggttccgcgtcgagaatgaactgaccgacgaagttacccacatcgtggcagaaaatctgtcacgctctgaagtattggcttggctgaaagaacacaagatggagaagaccaagcaattcgaactgctggatattagctggcttatcgaaagcatgaaagttggtaaaccggtggacaccaaggggaaataccagttggcggaatcggttgaggtgagtgcgaacccagatccgacagaaggtcgtgtaaacgagctgcctcctactatgaaaaccgtttctccgtatgcgtgtcaacgccgcaccaccctgaacaaccgtaatcaacgttttacggactcgctggagattcttcgccgtaattacgtgctgaaaggcaacgacgatactgcgctggaatttcgtcgtgctatctccgtgctgaaaagccttccgtttgaggtacgtagcctgaaagacacggaaggattgccctggatcagtgatgaagtcaaagggattatggaagaaatcatcgaagtcggggagtcgcgtgaagtgcaggccgtgctcaatgatgagtggtatcaaagcttccacgcatttacgcgtgtctttggagtgggggtgaagacagcagacaagtggtaccgcatgggtctgcgcaccctggaggatgttcgttccagcaagaccctgaagttgaccacgtgggcgaaagtaggtctgacgtattatgaagatcttgctcgcggcgttacccgtgcggaagctgacgcgatttggctgctggttcaggatgcagtcgcaactttcgacccggatgcgatcgtggagattgtcggtggacagcgtcgtgggaaacctcagtctcacgacgttgatctgcttatcagttctccgggagctgaaaaagagcaagaagaccaactcctgcagaaagtgatgaatctgtggaagaaacaagggttgttgctgtgtggtcgtctggaatggagtcagtgggaatgggggggtctgccgtccggtaaggctgatgagggtgacggggaggcatcgtgctttctgatcctcaaactttatgatcatctggtgcgtaaaagtaaacgcaatatgccgactggttcgaacatgggcgagtccaaaccgtggaaagcaattaaagtagatctgctgcgttgcccccgcggcagttttgcgtttgcgatgttgcagtggaccggaagccgcatgttccgtcgtgatctgcgcgattacgcccgcgaagagaagaacatgatgctggacaatcatagcctgtatgacatgactcgtggtatccaactccctgctaaatcggaagaggaaattttcgaacatctggggcttgaatacctggaaccgttcgaacgtaacgca

SEQ ID NO: 5058 - protein, 529 aa, synthetic construct
  REGION 1..529: note = Variant of terminal deoxynucleotidyltransferase
MHHHHHHGGSGSHGIRTIDSDFGKKQQKKGDNHDSSATYEIKFHEFVLFILEEKMGATRRTFLTDLARKKGFRVENELTDEVTHIVAENLSRSEVLAWLKEHKMEKTKQFELLDISWLIESMKVGKPVDTKGKYQLAESVEVSANPDPTEGRVNELPPTMKTVSPYACQRRTTLNNRNQRFTDSLEILRRNYVLKGNDDTALEFRRAISVLKSLPFEVRSLKDTEGLPWISDEVKGIMEEIIEVGESREVQAVLNDEWYQSFHAFTRVFGVGVKTADKWYRMGLRTLEDVRSSKTLKLTTWAKVGLTYYEDLARGVTRAEADAIWLLVQDAVATFDPDAIVEIVGGQRRGKPQSHDVDLLISSPGAEKEQEDQLLQKVMNLWKKQGLLLCGRLEWSQWEWGGLPSGKADEGDGEASCFLILKLYDHLVRKSKRNMPTGSNMGESKPWKAIKVDLLRCPRGSFAFAMLQWTGSRMFRRDLRDYAREEKNMMLDNHSLYDMTRGIQLPAKSEEEIFEHLGLEYLEPFERNA

SEQ ID NO: 5059 - DNA, 1587 bp, synthetic construct
  misc_feature 1..1587: note = Variant of terminal deoxynucleotidyltransferase
  source 1..1587: mol_type = other DNA
atgcaccatcatcatcatcatggcggtagcggcagccacggcattcgtaccatcgattcggacttcgggaagaaacagcagaaaaaaggcgataaccacgatagttccgccacttatgaaatcaaatttcacgagtttgtgctgttcattctcgaagaaaaaatgggtgcgacgcgtcgtacttttctgacagatttagcccgcaagaaagggttccgcgtcgagaatgaactgaccgacgaagttacccacatcgtggcagaaaatctgtcacgctctgaagtattggcttggctgaaagaacacaagatggagaagaccaagcaattcgaactgctggatattagctggcttatcgaaagcatgaaagttggtaaaccggtggacaccaaggggaaataccagttggcggaatcggttgaggtgagtgcgaacccagatccgacagaaggtcgtgtaaacgagctgcctcctactatgaaaaccgtttctccgtatgcgtgtcaacgccgcaccaccctgaacaaccgtaatcaacgttttacggactcgctggagattcttcgcgagaattacgtgtttaaaggcaacgacgatactgcgctggaatttcgtcgtgctgtgtccgtgctgaaaagccttccgtttgaggtacgtagcctgaaagacacggaaggattgccctggatcagtgatgaagtcaaagggattatggaagaaatcatcgaagtcggggagtcgcgtgaagtgcaggccgtgctcaatgatgagtggtatcaaagcttccacgcatttacgcgtgtctttggagtgggggtgaagacagcagacaagtggtaccgcatgggtctgcgcaccctggaggatgttcgttccagcaagaccctgaagttgaccacgtgggcgaaagtaggtctgacgtattatgaagatcttgctcgcggcgttacccgtgcggaagctgacgcgatttggctgctggttcaggatgcagtcgcaactttcgacccggatgcgatcgtggagattgtcggtggacagcgtcgtgggaaacctcagtctcacgacgttgatctgcttatcagttctccgggagctgaaaaagagcaagaagaccaactcctgcagaaagtgatgaatctgtggaagaaacaagggttgttgctgtgtggtcgtctggaatggagtcagtgggaatgggggggtctgccgtccggtaaggctgatgagggtgacggggaggcatcgtgctttctgatcctcaaactttatgatcatctggtgcgtaaaagtaaacgcaatatgccgactggttcgaacatgggcgagtccaaaccgtggaaagcaattaaagtagatctgctgcgttgcccccgcggcagttttgcgtttgcgatgttgcagtggaccggaagccgcatgttccgtcgtgatctgcgcgattacgcccgcgaagagaagaacatgatgctggacaatcatagcctgtatgacatgactcgtggtatccaactccctgctaaatcggaagaggaaattttcgaacatctggggcttgaatacctggaaccgttcgaacgtaacgca

SEQ ID NO: 5060 - protein, 529 aa, synthetic construct
  REGION 1..529: note = Variant of terminal deoxynucleotidyltransferase
MHHHHHHGGSGSHGIRTIDSDFGKKQQKKGDNHDSSATYEIKFHEFVLFILEEKMGATRRTFLTDLARKKGFRVENELTDEVTHIVAENLSRSEVLAWLKEHKMEKTKQFELLDISWLIESMKVGKPVDTKGKYQLAESVEVSANPDPTEGRVNELPPTMKTVSPYACQRRTTLNNRNQRFTDSLEILRENYVFKGNDDTALEFRRAVSVLKSLPFEVRSLKDTEGLPWISDEVKGIMEEIIEVGESREVQAVLNDEWYQSFHAFTRVFGVGVKTADKWYRMGLRTLEDVRSSKTLKLTTWAKVGLTYYEDLARGVTRAEADAIWLLVQDAVATFDPDAIVEIVGGQRRGKPQSHDVDLLISSPGAEKEQEDQLLQKVMNLWKKQGLLLCGRLEWSQWEWGGLPSGKADEGDGEASCFLILKLYDHLVRKSKRNMPTGSNMGESKPWKAIKVDLLRCPRGSFAFAMLQWTGSRMFRRDLRDYAREEKNMMLDNHSLYDMTRGIQLPAKSEEEIFEHLGLEYLEPFERNA

SEQ ID NO: 5061 - DNA, 1587 bp, synthetic construct
  misc_feature 1..1587: note = Variant of terminal deoxynucleotidyltransferase
  source 1..1587: mol_type = other DNA
atgcaccatcatcatcatcatggcggtagcggcagccacggcattcgtaccatcgattcggacttcgggaagaaacagcagaaaaaaggcgataaccacgatagttccgccacttatgaaatcaaatttcacgagtttgtgctgttcattctcgaagaaaaaatgggtgcgacgcgtcgtacttttctgacagatttagcccgcaagaaagggttccgcgtcgagaatgaactgaccgacgaagttacccacatcgtggcagaaaatctgtcacgctctgaagtattggcttggctgaaagaacacaagatggagaagaccaagcaattcgaactgctggatattagctggcttatcgaaagcatgaaagttggtaaaccggtggacaccaaggggaaataccagttggcggaatcggttgaggtgagtgcgaacccagatccgacagaaggtcgtgtaaacgagctgcctcctactatgaaaaccgtttctccgtatgcgtgtcaacgccgcaccaccctgaacaaccgtaatcaacgttttacggactcgctggagattcttcgcgagaattacgtgtttaaaggcaacgacgatactgcgctggaatttcgtcgtgctatctccgtgctgaaaagccttccgtttgaggtacgtagcctgaaagacacggaaggattgccctggatcagtgatgaagtcaaagggattatggaagaaatcatcgaagtcggggagtcgcgtgaagtgcaggccgtgctcaatgatgagtggtatcaaagcttccacgcatttacgcgtgtctttggagtgggggtgaagacagcagacaagtggtaccgcatgggtctgcgcaccctggaggatgttcgttccagcaagaccctgaagttgaccacgtgggcgaaagtaggtctgacgtattatgaagatcttgctcgcggcgttacccgtgcggaagctgacgcgatttggctgctggttcaggatgcagtcgcaactttcgacccggatgcgatcgtggagattgtcggtggacagcgtcgtgggaaacctcagtctcacgacgttgatctgcttatcagttctccgggagctgaaaaagagcaagaagaccaactcctgcagaaagtgatgaatctgtggaagaaacaagggttgttgctgtgtggtcgtctggaatggagtcagtgggaatgggggggtctgccgtccggtaaggctgatgagggtgacggggaggcatcgtgctttctgatcctcaaactttatgatcatctggtgcgtaaaagtaaacgcaatatgccgactggttcgaacatgggcgagtccaaaccgtggaaagcaattaaagtagatctgctgcgttgcccccgcggcagttttgcgtttgcgatgttgcagtggaccggaactcgcatgttccgtcgtgatctgcgcgattacgcccgcgaagagaagaacatgatgctggacaatcatagcctgtatgacatgactcgtggtatccaactccctgctaaatcggaagaggaaattttcgaacatctggggcttgaatacctggaaccgttcgaacgtaacgca

SEQ ID NO: 5062 - protein, 529 aa, synthetic construct
  REGION 1..529: note = Variant of terminal deoxynucleotidyltransferase
MHHHHHHGGSGSHGIRTIDSDFGKKQQKKGDNHDSSATYEIKFHEFVLFILEEKMGATRRTFLTDLARKKGFRVENELTDEVTHIVAENLSRSEVLAWLKEHKMEKTKQFELLDISWLIESMKVGKPVDTKGKYQLAESVEVSANPDPTEGRVNELPPTMKTVSPYACQRRTTLNNRNQRFTDSLEILRENYVFKGNDDTALEFRRAISVLKSLPFEVRSLKDTEGLPWISDEVKGIMEEIIEVGESREVQAVLNDEWYQSFHAFTRVFGVGVKTADKWYRMGLRTLEDVRSSKTLKLTTWAKVGLTYYEDLARGVTRAEADAIWLLVQDAVATFDPDAIVEIVGGQRRGKPQSHDVDLLISSPGAEKEQEDQLLQKVMNLWKKQGLLLCGRLEWSQWEWGGLPSGKADEGDGEASCFLILKLYDHLVRKSKRNMPTGSNMGESKPWKAIKVDLLRCPRGSFAFAMLQWTGTRMFRRDLRDYAREEKNMMLDNHSLYDMTRGIQLPAKSEEEIFEHLGLEYLEPFERNA

SEQ ID NO: 5063 - DNA, 1587 bp, synthetic construct
  misc_feature 1..1587: note = Variant of terminal deoxynucleotidyltransferase
  source 1..1587: mol_type = other DNA
atgcaccatcatcatcatcatggcggtagcggcagccacggcattcgtaccatcgattcggacttcgggaagaaacagcagaaaaaaggcgataaccacgatagttccgccacttatgaaatcaaatttcacgagtttgtgctgttcattctcgaagaaaaaatgggtgcgacgcgtcgtacttttctgacagatttagcccgcaagaaagggttccgcgtcgagaatgaactgaccgacgaagttacccacatcgtggcagaaaatctgtcacgctctgaagtattggcttggctgaaagaacacaagatggagaagaccaagcaattcgaactgctggatattagctggcttatcgaaagcatgaaagttggtaaaccggtggacaccaaggggaaataccagttggcggaatcggttgaggtgagtgcgaacccagatccgacagaaggtcgtgtaaacgagctgcctcctactatgaaaaccgtttctccgtatgcgtgtcaacgccgcaccaccctgaacaaccgtaatcaacgttttacggactcgctggagattcttcgcgagaattacgtgtttaaaggcaacgacgatactgcgctggaatttcgtcgtgctatctccgtgctgaaaagccttccgtttgaggtacgtagcctgaaagacacggaaggattgccctggatcagtgatgaagtcaaagggattatggaagaaatcatcgaagtcggggagtcgcgtgaagtgcaggccgtgctcaatgatgagtggtatcaaagcttccacgcatttacgcgtgtctttggagtgggggtggttacagcagacaagtggtaccgcatgggtctgcgcaccctggaggatgttcgttccagcaagaccctgaagttgaccacgtgggcgaaagtaggtctgacgtattatgaagatcttgctcgcggcgttacccgtgcggaagctgacgcgatttggctgctggttcaggatgcagtcgcaactttcgacccggatgcgatcgtggagattgtcggtggacagcgtcgtgggaaacctcagtctcacgacgttgatctgcttatcagttctccgggagctgaaaaagagcaagaagaccaactcctgcagaaagtgatgaatctgtggaagaaacaagggttgttgctgtgtggtcgtctggaatggagtcagtgggaatgggggggtctgccgtccggtaaggctgatgagggtgacggggaggcatcgtgctttctgatcctcaaactttatgatcatctggtgcgtaaaagtaaacgcaatatgccgactggttcgaacatgggcgagtccaaaccgtggaaagcaattaaagtagatctgctgcgttgcccccgcggcagttttgcgtttgcgatgttgcagtggaccggaagccgcatgttccgtcgtgatctgcgcgattacgcccgcgaagagaagaacatgatgctggacaatcatagcctgtatgacatgactcgtggtatccaactccctgctaaatcggaagaggaaattttcgaacatctggggcttgaatacctggaaccgttcgaacgtaacgca

SEQ ID NO: 5064 - protein, 529 aa, synthetic construct
  REGION 1..529: note = Variant of terminal deoxynucleotidyltransferase
MHHHHHHGGSGSHGIRTIDSDFGKKQQKKGDNHDSSATYEIKFHEFVLFILEEKMGATRRTFLTDLARKKGFRVENELTDEVTHIVAENLSRSEVLAWLKEHKMEKTKQFELLDISWLIESMKVGKPVDTKGKYQLAESVEVSANPDPTEGRVNELPPTMKTVSPYACQRRTTLNNRNQRFTDSLEILRENYVFKGNDDTALEFRRAISVLKSLPFEVRSLKDTEGLPWISDEVKGIMEEIIEVGESREVQAVLNDEWYQSFHAFTRVFGVGVVTADKWYRMGLRTLEDVRSSKTLKLTTWAKVGLTYYEDLARGVTRAEADAIWLLVQDAVATFDPDAIVEIVGGQRRGKPQSHDVDLLISSPGAEKEQEDQLLQKVMNLWKKQGLLLCGRLEWSQWEWGGLPSGKADEGDGEASCFLILKLYDHLVRKSKRNMPTGSNMGESKPWKAIKVDLLRCPRGSFAFAMLQWTGSRMFRRDLRDYAREEKNMMLDNHSLYDMTRGIQLPAKSEEEIFEHLGLEYLEPFERNA

SEQ ID NO: 5065 - DNA, 1587 bp, synthetic construct
  misc_feature 1..1587: note = Variant of terminal deoxynucleotidyltransferase
  source 1..1587: mol_type = other DNA
atgcaccatcatcatcatcatggcggtagcggcagccacggcattcgtaccatcgattcggacttcgggaagaaacagcagaaaaaaggcgataaccacgatagttccgccacttatgaaatcaaatttcacgagtttgtgctgttcattctcgaagaaaaaatgggtgcgacgcgtcgtacttttctgacagatttagcccgcaagaaagggttccgcgtcgagaatgaactgaccgacgaagttacccacatcgtggcagaaaatctgtcacgctctgaagtattggcttggctgaaagaacacaagatggagaagaccaagcaattcgaactgctggatattagctggcttatcgaaagcatgaaagttggtaaaccggtggacaccaaggggaaataccagttggcggaatcggttgaggtgagtgcgaacccagatccgacagaaggtcgtgtaaacgagctgcctcctactatgaaaaccgtttctccgtatgcgtgtcaacgccgcaccaccctgaacaaccgtaatcaacgttttacggactcgctggagattcttcgcgagaattacgtgtttaaaggcaacgacgatactgcgctggaatttcgtcgtgctatctccgtgctgaaaagccttccgtttgaggtacgtagcctgaaagacacggaaggattgccctggatcagtgatgaagtcaaagggattatggaagaaatcatcgaagtcggggagtcgcgtgaagtgcaggccgtgctcaatgatgagtggtatcaaagcttccacgcatttacgcgtgtctttggagtgggggtgaagacagcagacaagtggtaccgcatgggtctgcgcaccctggaggatgttcgttccagcaagaccctgaagttgaccacgtgggcgaaagtaggtctgacgtattatgaagatcttgctcgcggcgttacccgtgcggaagctgacgcgatttggctgctggttcaggatgcagtcgcaactttcgacccggatgcgatcgtggagattgtcggtggacagcgtcgtgggaaacctcagtctcacgacgttgatctgcttatcagttctccgggagctgaaaaagagcaagaagaccaactcctgcagaaagtgatgaatctgtggaagaaacaagggttgttgctgtgtggtcgtctggaatggagtcagtgggaatgggggggtctgccgtccggtaaggctgatgagggtgacggggaggcatcgtgctttctgatcctcaaactttatgatcatctggtgcgtaaaagtaaacgcaatatgccgactggttcgaacatgggcgagtccaaaccgtggaaagcaattaaagtagatctgctgcgttgcccccgcggcagttttgcgtttgcgatgttgcagtggaccggaagccgcatgttccgtcgtgatctgcgcgattacgcccgcgaagagaagaacatgatgctggacaatcatagcctgtatgacatgactcgtggtatccaactccctgctaaatcggaagaggaaattttcgaacatctggggcttgaatacctggaaccgttccttcgtaacgca

SEQ ID NO: 5066 - protein, 529 aa, synthetic construct
  REGION 1..529: note = Variant of terminal deoxynucleotidyltransferase
MHHHHHHGGSGSHGIRTIDSDFGKKQQKKGDNHDSSATYEIKFHEFVLFILEEKMGATRRTFLTDLARKKGFRVENELTDEVTHIVAENLSRSEVLAWLKEHKMEKTKQFELLDISWLIESMKVGKPVDTKGKYQLAESVEVSANPDPTEGRVNELPPTMKTVSPYACQRRTTLNNRNQRFTDSLEILRENYVFKGNDDTALEFRRAISVLKSLPFEVRSLKDTEGLPWISDEVKGIMEEIIEVGESREVQAVLNDEWYQSFHAFTRVFGVGVKTADKWYRMGLRTLEDVRSSKTLKLTTWAKVGLTYYEDLARGVTRAEADAIWLLVQDAVATFDPDAIVEIVGGQRRGKPQSHDVDLLISSPGAEKEQEDQLLQKVMNLWKKQGLLLCGRLEWSQWEWGGLPSGKADEGDGEASCFLILKLYDHLVRKSKRNMPTGSNMGESKPWKAIKVDLLRCPRGSFAFAMLQWTGSRMFRRDLRDYAREEKNMMLDNHSLYDMTRGIQLPAKSEEEIFEHLGLEYLEPFLRNA

SEQ ID NO: 5067 - DNA, 1587 bp, synthetic construct
  misc_feature 1..1587: note = Variant of terminal deoxynucleotidyltransferase
  source 1..1587: mol_type = other DNA
atgcaccatcatcatcatcatggcggtagcggcagccacggcattcgtaccatcgattcggacttcgggaagaaacagcagaaaaaaggcgataaccacgatagttccgccacttatgaaatcaaatttcacgagtttgtgctgttcattctcgaagaaaaaatgggtgcgacgcgtcgtacttttctgacagatttagcccgcaagaaagggttccgcgtcgagaatgaactgaccgacgaagttacccacatcgtggcagaaaatctgtcacgctctgaagtattggcttggctgaaagaacacaagatggagaagaccaagcaattcgaactgctggatattagctggcttatcgaaagcatgaaagttggtaaaccggtggacaccaaggggaaataccagttggcggaatcggttgaggtgagtgcgaacccagatccgacagaaggtcgtgtaaacgagctgcctcctactatgaaaaccgtttctccgtatgcgtgtcaacgccgcaccaccctgaacaaccgtaatcaacgttttacggactcgctggagattcttcgcgaaaattacgtgttgaaaggcaacgacgatactgcgctggaatttcgtcgtgctatctccgtgctgaaaagccttccgtttgaggtacgtagcctgaaagacacggaaggattgccctggatcagtgatgaagtcaaagggattatggaagaaatcatcgaagtcggggagtcgcgtgaagtgcaggccgtgctcaatgatgagtggtatcaaagcttccacgcatttacgcgtgtctttggagtgggggtgaagacagcagacaagtggtaccgcatgggtctgcgcaccctggaggatgttcgttccagcaagaccctgaagttgaccacgtgggcgaaagtaggtctgacgtattatgaagatcttgctcgcggcgttacccgtgcggaagctgacgcgatttggctgctggttcaggatgcagtcgcaactttcgacccggatgcgatcgtggagattgtcggtggacagcgtcgtgggaaacctcagtctcacgacgttgatctgcttatcagttctccgggagctgaaaaagagcaagaagaccaactcctgcagaaagtgatgaatctgtggaagaaacaagggttgttgctgtgtggtcgtctggaatggagtcagtgggaatgggggggtctgccgtccggtaaggctgatgagggtgacggggaggcatcgtgctttctgatcctcaaactttatgatcatctggtgcgtaaaagtaaacgcaatatgccgactggttcgaacatgggcgagtccaaaccgtggaaagcaattaaagtagatctgctgcgttgcccccgcggcagttttgcgtttgcgatgttgcagtggaccggaagccgcatgttccgtcgtgatctgcgcgattacgcccgcgaagagaagaacatgatgctggacaatcatagcctgtatgacatgactcgtggtatccaactccctgctaaatcggaagaggaaattttcgaacatctggggcttgaatacctggaaccgttcgaacgtaacgca

SEQ ID NO: 5068 - protein, 529 aa, synthetic construct
  REGION 1..529: note = Variant of terminal deoxynucleotidyltransferase
MHHHHHHGGSGSHGIRTIDSDFGKKQQKKGDNHDSSATYEIKFHEFVLFILEEKMGATRRTFLTDLARKKGFRVENELTDEVTHIVAENLSRSEVLAWLKEHKMEKTKQFELLDISWLIESMKVGKPVDTKGKYQLAESVEVSANPDPTEGRVNELPPTMKTVSPYACQRRTTLNNRNQRFTDSLEILRENYVLKGNDDTALEFRRAISVLKSLPFEVRSLKDTEGLPWISDEVKGIMEEIIEVGESREVQAVLNDEWYQSFHAFTRVFGVGVKTADKWYRMGLRTLEDVRSSKTLKLTTWAKVGLTYYEDLARGVTRAEADAIWLLVQDAVATFDPDAIVEIVGGQRRGKPQSHDVDLLISSPGAEKEQEDQLLQKVMNLWKKQGLLLCGRLEWSQWEWGGLPSGKADEGDGEASCFLILKLYDHLVRKSKRNMPTGSNMGESKPWKAIKVDLLRCPRGSFAFAMLQWTGSRMFRRDLRDYAREEKNMMLDNHSLYDMTRGIQLPAKSEEEIFEHLGLEYLEPFERNA

SEQ ID NO: 5069 - DNA, 1587 bp, synthetic construct
  misc_feature 1..1587: note = Variant of terminal deoxynucleotidyltransferase
  source 1..1587: mol_type = other DNA
atgcaccatcatcatcatcatggcggtagcggcagccacggcattcgtaccatcgattcggacttcgggaagaaacagcagaaaaaaggcgataaccacgatagttccgccacttatgaaatcaaatttcacgagtttgtgctgttcattctcgaagaaaaaatgggtgcgacgcgtcgtacttttctgacagatttagcccgcaagaaagggttccgcgtcgagaatgaactgaccgacgaagttacccacatcgtggcagaaaatctgtcacgctctgaagtattggcttggctgaaagaacacaagatggagaagaccaagcaattcgaactgctggatattagctggcttatcgaaagcatgaaagttggtaaaccggtggacaccaaggggaaataccagttggcggaatcggttgaggtgagtgcgaacccagatccgacagaaggtcgtgtaaacgagctgcctcctactatgaaaaccgtttctccgtatgcgtgtcaacgccgcaccaccctgaacaaccgtaatcaacgttttacggactcgctggagattcttcgcgagaattacgtgtttaaaggcaacgacgatactgcgctggaatttcgtcgtgctatctccgtgctgaaaagccttccgtttgaggtacgtagcctgaaagacacggaaggattgccctggatcagtgatgaagtcaaagggattatggaagaaatcatcgaagtcggggagtcgcgtgaagtgcaggccgtgctcaatgatgagtggtatcaaagcttccacgcatttacgcgtgtctttggagtgggggtgaagacagcagacaagtggtaccgcatgggtctgcgcaccctggaggatgttcgttccagcaagaccctgaagctgaccacgtgggcgaaagtaggtctgacgtattatgaagatcttgctcgcggcgttacccgtgcggaagctgacgcgatttggctgctggttcaggatgcagtcgcaactttcgacccggatgcgatcgtggagattgtcggtggacagcgtcgtgggaaacctcagtctcacgacgttgatctgcttatcagttctccgggagctgaaaaagagcaagaagaccaactcctgcagaaagtgatgaatctgtggaagaaacaagggttgttgctgtgtggtcatgtggcgtggagtcagtgggaatgggggggtctgccgtccggtaaggctgatgagggtgacggggaggcatcgtgctttctgatcctcaaactttatgatcatctggtgcgtaaaagtaaacgcaatatgccgactggttcgaacatgggcgagtccaaaccgtggaaagcaattaaagtagatctgctgcgttgcccccgcggcagttttgcgtttgcgatgttgcagtggaccggaagccgcatgttccgtctggatctgcgcgattacgcccgcgaagagaagaacatgatgctggacaatcattcgctgtatgacatgactcgtggtatccaactccctgctaaatcggaagaggaaattttcgaacatctggggcttgaatacctggaaccgttcgaacgtaacgca

SEQ ID NO: 5070 - protein, 529 aa, synthetic construct
  REGION 1..529: note = Variant of terminal deoxynucleotidyltransferase
MHHHHHHGGSGSHGIRTIDSDFGKKQQKKGDNHDSSATYEIKFHEFVLFILEEKMGATRRTFLTDLARKKGFRVENELTDEVTHIVAENLSRSEVLAWLKEHKMEKTKQFELLDISWLIESMKVGKPVDTKGKYQLAESVEVSANPDPTEGRVNELPPTMKTVSPYACQRRTTLNNRNQRFTDSLEILRENYVFKGNDDTALEFRRAISVLKSLPFEVRSLKDTEGLPWISDEVKGIMEEIIEVGESREVQAVLNDEWYQSFHAFTRVFGVGVKTADKWYRMGLRTLEDVRSSKTLKLTTWAKVGLTYYEDLARGVTRAEADAIWLLVQDAVATFDPDAIVEIVGGQRRGKPQSHDVDLLISSPGAEKEQEDQLLQKVMNLWKKQGLLLCGHVAWSQWEWGGLPSGKADEGDGEASCFLILKLYDHLVRKSKRNMPTGSNMGESKPWKAIKVDLLRCPRGSFAFAMLQWTGSRMFRLDLRDYAREEKNMMLDNHSLYDMTRGIQLPAKSEEEIFEHLGLEYLEPFERNA

SEQ ID NO: 5071 - DNA, 1587 bp, synthetic construct
  misc_feature 1..1587: note = Variant of terminal deoxynucleotidyltransferase
  source 1..1587: mol_type = other DNA
atgcaccatcatcatcatcatggcggtagcggcagccacggcattcgtaccatcgattcggacttcgggaagaaacagcagaaaaaaggcgataaccacgatagttccgccacttatgaaatcaaatttcacgagtttgtgctgttcattctcgaagaaaaaatgggtgcgacgcgtcgtacttttctgacagatttagcccgcaagaaagggttccgcgtcgagaatgaactgaccgacgaagttacccacatcgtggcagaaaatctgtcacgctctgaagtattggcttggctgaaagaacacaagatggagaagaccaagcaattcgaactgctggatattagctggcttatcgaaagcatgaaagttggtaaaccggtggacaccaaggggaaataccagttggcggaatcggttgaggtgagtgcgaacccagatccgacagaaggtcgtgtaaacgagctgcctcctactatgaaaaccgtttctccgtatgcgtgtcaacgccgcaccaccctgaacaaccgtaatcaacgttttacggactcgctggagattcttcgcgagaattacgtgtttaaaggcaacgacgatactgcgctggaatttcgtcgtgctatctccgtgctgaaaagccttccgtttgaggtacgtagcctgaaagacacggaaggattgccctggatcagtgatgaagtcaaagggattatggaagaaatcatcgaagtcggggagtcgcgtgaagtgcaggccgtgctcaatgatgagtggtatcaaagcttccacgcatttacgcgtgtctttggagtgggggtgaagacagcagacaagtggtaccgcatgggtctgcgcaccctggaggatgttcgttccagcaagaccctgaagttgaccacgtgggcgaaagtaggtctgacgtattatgaagatcttgctcgcggcgttacccgtgcggaagctgacgcgatttggctgctggttcaggatgcagtcgcaactttcgacccggatgcgatcgtggagattgtcggtggacagcgtcgtgggaaacctcagtctcacgacgttgatctgcttatcagttctccgggagctgaaaaagagcaagaagaccaactcctgcagaaagtgatgaatctgtggaagaaacaagggttgttgctgtgtggtcgtctggaatggagtcagtgggaatgggggggtctgccgtccggtaaggctgatgagggtgacggggaggcatcgtgctttctgatcctcaaactttatgatcatctggtgcgtaaaagtaaacgcaatatgccgactggttcgaacatgggcgagtccaaaccgtggaaagcaattaaagtagatctgctgcgttgcccccgcggcagttttgcgtttgcgatgttgcagtggaccggaagccgcatgttccgtcgtgatctgcgcgattacgcccgcgaagagaagaacatgatgctggacaatcatagcctgtatgacatgactcgtggtatccaactccctgctaaatcggaagaggaaattttcgaacatctggggcttgaatacctggaaccgttctatcgtaacgca

SEQ ID NO: 5072 - protein, 529 aa, synthetic construct
  REGION 1..529: note = Variant of terminal deoxynucleotidyltransferase
MHHHHHHGGSGSHGIRTIDSDFGKKQQKKGDNHDSSATYEIKFHEFVLFILEEKMGATRRTFLTDLARKKGFRVENELTDEVTHIVAENLSRSEVLAWLKEHKMEKTKQFELLDISWLIESMKVGKPVDTKGKYQLAESVEVSANPDPTEGRVNELPPTMKTVSPYACQRRTTLNNRNQRFTDSLEILRENYVFKGNDDTALEFRRAISVLKSLPFEVRSLKDTEGLPWISDEVKGIMEEIIEVGESREVQAVLNDEWYQSFHAFTRVFGVGVKTADKWYRMGLRTLEDVRSSKTLKLTTWAKVGLTYYEDLARGVTRAEADAIWLLVQDAVATFDPDAIVEIVGGQRRGKPQSHDVDLLISSPGAEKEQEDQLLQKVMNLWKKQGLLLCGRLEWSQWEWGGLPSGKADEGDGEASCFLILKLYDHLVRKSKRNMPTGSNMGESKPWKAIKVDLLRCPRGSFAFAMLQWTGSRMFRRDLRDYAREEKNMMLDNHSLYDMTRGIQLPAKSEEEIFEHLGLEYLEPFYRNA

SEQ ID NO: 5073 - DNA, 1587 bp, synthetic construct
  misc_feature 1..1587: note = Variant of terminal deoxynucleotidyltransferase
  source 1..1587: mol_type = other DNA
atgcaccatcatcatcatcatggcggtagcggcagccacggcattcgtaccatcgattcggacttcgggaagaaacagcagaaaaaaggcgataaccacgatagttccgccacttatgaaatcaaatttcacgagtttgtgctgttcattctcgaagaaaaaatgggtgcgacgcgtcgtacttttctgacagatttagcccgcaagaaagggttccgcgtcgagaatgaactgaccgacgaagttacccacatcgtggcagaaaatctgtcacgctctgaagtattggcttggctgaaagaacacaagatggagaagaccaagcaattcgaactgctggatattagctggcttatcgaaagcatgaaagttggtaaaccggtggacaccaaggggaaataccagttggcggaatcggttgaggtgagtgcgaacccagatccgacagaaggtcgtgtaaacgagctgcctcctactatgaaaaccgtttctccgtatgcgtgtcaacgccgcaccaccctgaacaaccgtaatcaacgttttacggactcgctggagattcttcgcgagaattacgtgtttaaaggcaacgacgatactgcgctggaatttcgtcgtgctatctccgtgctgaaaagccttccgtttgaggtacgtagcctgaaagacacggaaggattgccctggatcagtgatgaagtcaaagggattatggaagaaatcatcgaagtcggggagtcgcgtgaagtgcaggccgtgctcaatgatgagtggtatcaaagcttccacgcatttacgcgtgtctttggagtgggggtgaagacagcagacaagtggtaccgcatgggtctgcgcaccctggaggatgttcgttccagcaagaccctgaagtttaccacgtgggcgaaagtaggtctgacgtattatgaagatcttgctcgcggcgttacccgtgcggaagctgacgcgatttggctgctggttcaggatgcagtcgcaactttcgacccggatgcgatcgtggagattgtcggtggacagcgtcgtgggaaacctcagtctcacgacgttgatctgcttatcagttctccgggagctgaaaaagagcaagaagaccaactcctgcagaaagtgatgaatctgtggaagaaacaagggttgttgctgtgtggtaaagtggcgtggagtcagtgggaatgggggggtctgccgtccggtaaggctgatgagggtgacggggaggcatcgtgctttctgatcctcaaactttatgatcatctggtgcgtaaaagtaaacgcaatatgccgactggttcgaacatgggcgagtccaaaccgtggaaagcaattaaagtagatctgctgcgttgcccccgcggcagttttgcgtttgcgatgttgcagtggaccggaagccgcatgttccgtctggatctgcgcgattacgcccgcgaagagaagaacatgatgctggacaatcatagcctgtatgacatgactcgtggtatccaactccctgctaaatcggaagaggaaattttcgaacatctggggcttgaatacctggaaccgttcgaacgtaacgca

SEQ ID NO: 5074 - protein, 529 aa, synthetic construct
  REGION 1..529: note = Variant of terminal deoxynucleotidyltransferase
MHHHHHHGGSGSHGIRTIDSDFGKKQQKKGDNHDSSATYEIKFHEFVLFILEEKMGATRRTFLTDLARKKGFRVENELTDEVTHIVAENLSRSEVLAWLKEHKMEKTKQFELLDISWLIESMKVGKPVDTKGKYQLAESVEVSANPDPTEGRVNELPPTMKTVSPYACQRRTTLNNRNQRFTDSLEILRENYVFKGNDDTALEFRRAISVLKSLPFEVRSLKDTEGLPWISDEVKGIMEEIIEVGESREVQAVLNDEWYQSFHAFTRVFGVGVKTADKWYRMGLRTLEDVRSSKTLKFTTWAKVGLTYYEDLARGVTRAEADAIWLLVQDAVATFDPDAIVEIVGGQRRGKPQSHDVDLLISSPGAEKEQEDQLLQKVMNLWKKQGLLLCGKVAWSQWEWGGLPSGKADEGDGEASCFLILKLYDHLVRKSKRNMPTGSNMGESKPWKAIKVDLLRCPRGSFAFAMLQWTGSRMFRLDLRDYAREEKNMMLDNHSLYDMTRGIQLPAKSEEEIFEHLGLEYLEPFERNA

SEQ ID NO: 5075 - DNA, 1587 bp, synthetic construct
  misc_feature 1..1587: note = Variant of terminal deoxynucleotidyltransferase
  source 1..1587: mol_type = other DNA
atgcaccatcatcatcatcatggcggtagcggcagccacggcattcgtaccatcgattcggacttcgggaagaaacagcagaaaaaaggcgataaccacgatagttccgccacttatgaaatcaaatttcacgagtttgtgctgttcattctcgaagaaaaaatgggtgcgacgcgtcgtacttttctgacagatttagcccgcaagaaagggttccgcgtcgagaatgaactgaccgacgaagttacccacatcgtggcagaaaatctgtcacgctctgaagtattggcttggctgaaagaacacaagatggagaagaccaagcaattcgaactgctggatattagctggcttatcgaaagcatgaaagttggtaaaccggtggacaccaaggggaaataccagttggcggaatcggttgaggtgagtgcgaacccagatccgacagaaggtcgtgtaaacgagctgcctcctactatgaaaaccgtttctccgtatgcgtgtcaacgccgcaccaccctgaacaaccgtaatcaacgttttacggactcgctggagattcttcgcgagaattacgtgtttaaaggcaacgacgatactgcgctggaatttcgtcgtgctatctccgtgctgaaaagccttccgtttgaggtacgtagcctgaaagacacggaaggattgccctggatcagtgatgaagtcaaagggattatggaagaaatcatcgaagtcggggagtcgcgtgaagtgcaggccgtgctcaatgatgagtggtatcaaagcttccacgcatttacgcgtgtctttggagtgggggtggggacagcagacaagtggtaccgcatgggtctgcgcaccctggaggatgttcgttccagcaagaccctgaagttgaccacgtgggcgaaagtaggtctgacgtattatgaagatcttgctcgcggcgttacccgtgcggaagctgacgcgatttggctgctggttcaggatgcagtcgcaactttcgacccggatgcgatcgtggagattgtcggtggacagcgtcgtgggaaacctcagtctcacgacgttgatctgcttatcagttctccgggagctgaaaaagagcaagaagaccaactcctgcagaaagtgatgaatctgtggaagaaacaagggttgttgctgtgtggtcgtctggaatggagtcagtgggaatgggggggtctgccgtccggtaaggctgatgagggtgacggggaggcatcgtgctttctgatcctcaaactttatgatcatctggtgcgtaaaagtaaacgcaatatgccgactggttcgaacatgggcgagtccaaaccgtggaaagcaattaaagtagatctgctgcgttgcccccgcggcagttttgcgtttgcgatgttgcagtggaccggaagccgcatgttccgtcgtgatctgcgcgattacgcccgcgaagagaagaacatgatgctggacaatcatagcctgtatgacatgactcgtggtatccaactccctgctaaatcggaagaggaaattttcgaacatctggggcttgaatacctggaaccgttcgaacgtaacgca

SEQ ID NO: 5076 - protein, 529 aa, synthetic construct
  REGION 1..529: note = Variant of terminal deoxynucleotidyltransferase
MHHHHHHGGSGSHGIRTIDSDFGKKQQKKGDNHDSSATYEIKFHEFVLFILEEKMGATRRTFLTDLARKKGFRVENELTDEVTHIVAENLSRSEVLAWLKEHKMEKTKQFELLDISWLIESMKVGKPVDTKGKYQLAESVEVSANPDPTEGRVNELPPTMKTVSPYACQRRTTLNNRNQRFTDSLEILRENYVFKGNDDTALEFRRAISVLKSLPFEVRSLKDTEGLPWISDEVKGIMEEIIEVGESREVQAVLNDEWYQSFHAFTRVFGVGVGTADKWYRMGLRTLEDVRSSKTLKLTTWAKVGLTYYEDLARGVTRAEADAIWLLVQDAVATFDPDAIVEIVGGQRRGKPQSHDVDLLISSPGAEKEQEDQLLQKVMNLWKKQGLLLCGRLEWSQWEWGGLPSGKADEGDGEASCFLILKLYDHLVRKSKRNMPTGSNMGESKPWKAIKVDLLRCPRGSFAFAMLQWTGSRMFRRDLRDYAREEKNMMLDNHSLYDMTRGIQLPAKSEEEIFEHLGLEYLEPFERNA

SEQ ID NO: 5077 - DNA, 1587 bp, synthetic construct
  misc_feature 1..1587: note = Variant of terminal deoxynucleotidyltransferase
  source 1..1587: mol_type = other DNA
atgcaccatcatcatcatcatggcggtagcggcagccacggcattcgtaccatcgattcggacttcgggaagaaacagcagaaaaaaggcgataaccacgatagttccgccacttatgaaatcaaatttcacgagtttgtgctgttcattctcgaagaaaaaatgggtgcgacgcgtcgtacttttctgacagatttagcccgcaagaaagggttccgcgtcgagaatgaactgaccgacgaagttacccacatcgtggcagaaaatctgtcacgctctgaagtattggcttggctgaaagaacacaagatggagaagaccaagcaattcgaactgctggatattagctggcttatcgaaagcatgaaagttggtaaaccggtggacaccaaggggaaataccagttggcggaatcggttgaggtgagtgcgaacccagatccgacagaaggtcgtgtaaacgagctgcctcctactatgaaaaccgtttctccgtatgcgtgtcaacgccgcaccaccctgaacaaccgtaatcaacgttttacggactcgctggagattcttcgcgagaattacgtgtttaaaggcaacgacgatactgcgctggaatttcgtcgtgctatctccgtgctgaaaagccttccgtttgaggtacgtagcctgaaagacacggaaggattgccctggatcagtgatgaagtcaaagggattatggaagaaatcatcgaagtcggggagtcgcgtgaagtgcaggccgtgctcaatgatgagtggtatcaaagcttccacgcatttacgcgtgtctttggagtgggggtgtggacagcagacaagtggtaccgcatgggtctgcgcaccctggaggatgttcgttccagcaagaccctgaagttgaccacgtgggcgaaagtaggtctgacgtattatgaagatcttgctcgcggcgttacccgtgcggaagctgacgcgatttggctgctggttcaggatgcagtcgcaactttcgacccggatgcgatcgtggagattgtcggtggacagcgtcgtgggaaacctcagtctcacgacgttgatctgcttatcagttctccgggagctgaaaaagagcaagaagaccaactcctgcagaaagtgatgaatctgtggaagaaacaagggttgttgctgtgtggtcgtctggaatggagtcagtgggaatgggggggtctgccgtccggtaaggctgatgagggtgacggggaggcatcgtgctttctgatcctcaaactttatgatcatctggtgcgtaaaagtaaacgcaatatgccgactggttcgaacatgggcgagtccaaaccgtggaaagcaattaaagtagatctgctgcgttgcccccgcggcagttttgcgtttgcgatgttgcagtggaccggaagccgcatgttccgtcgtgatctgcgcgattacgcccgcgaagagaagaacatgatgctggacaatcatagcctgtatgacatgactcgtggtatccaactccctgctaaatcggaagaggaaattttcgaacatctggggcttgaatacctggaaccgttcgaacgtaacgca

SEQ ID NO: 5078 - protein, 529 aa, synthetic construct
  REGION 1..529: note = Variant of terminal deoxynucleotidyltransferase
MHHHHHHGGSGSHGIRTIDSDFGKKQQKKGDNHDSSATYEIKFHEFVLFILEEKMGATRRTFLTDLARKKGFRVENELTDEVTHIVAENLSRSEVLAWLKEHKMEKTKQFELLDISWLIESMKVGKPVDTKGKYQLAESVEVSANPDPTEGRVNELPPTMKTVSPYACQRRTTLNNRNQRFTDSLEILRENYVFKGNDDTALEFRRAISVLKSLPFEVRSLKDTEGLPWISDEVKGIMEEIIEVGESREVQAVLNDEWYQSFHAFTRVFGVGVWTADKWYRMGLRTLEDVRSSKTLKLTTWAKVGLTYYEDLARGVTRAEADAIWLLVQDAVATFDPDAIVEIVGGQRRGKPQSHDVDLLISSPGAEKEQEDQLLQKVMNLWKKQGLLLCGRLEWSQWEWGGLPSGKADEGDGEASCFLILKLYDHLVRKSKRNMPTGSNMGESKPWKAIKVDLLRCPRGSFAFAMLQWTGSRMFRRDLRDYAREEKNMMLDNHSLYDMTRGIQLPAKSEEEIFEHLGLEYLEPFERNA

SEQ ID NO: 5079 - DNA, 1587 bp, synthetic construct
  misc_feature 1..1587: note = Variant of terminal deoxynucleotidyltransferase
  source 1..1587: mol_type = other DNA
atgcaccatcatcatcatcatggcggtagcggcagccacggcattcgtaccatcgattcggacttcgggaagaaacagcagaaaaaaggcgataaccacgatagttccgccacttatgaaatcaaatttcacgagtttgtgctgttcattctcgaagaaaaaatgggtgcgacgcgtcgtacttttctgacagatttagcccgcaagaaagggttccgcgtcgagaatgaactgaccgacgaagttacccacatcgtggcagaaaatctgtcacgctctgaagtattggcttggctgaaagaacacaagatggagaagaccaagcaattcgaactgctggatattagctggcttatcgaaagcatgaaagttggtaaaccggtggacaccaaggggaaataccagttggcggaatcggttgaggtgagtgcgaacccagatccgacagaaggtcgtgtaaacgagctgcctcctactatgaaaaccgtttctccgtatgcgtgtcaacgccgcaccaccctgaacaaccgtaatcaacgttttacggactcgctggagattcttcgcgagaattacgtgtttaaaggcaacgacgatactgcgctggaatttcgtcgtgctatctccgtgctgaaaagccttccgtttgaggtacgtagcctgaaagacacggaaggattgccctggatcagtgatgaagtcaaagggattatggaagaaatcatcgaagtcggggagtcgcgtgaagtgcaggccgtgctcaatgatgagtggtatcaaagcttccacgcatttacgcgtgtctttggagtgggggtgaagacagcagacaagtggtaccgcatgggtctgcgcaccctggaggatgttcgttccagcaagaccctgaagttgaccacgtgggcgaaagtaggtctgacgtattatgaagatcttgctcgcggcgttacccgtgcggaagctgacgcgatttggctgctggttcaggatgcagtcgcaactttcgacccggatgcgatcgtggagattgtcggtggacagcgtcgtgggaaacctcagtctcacgacgttgatctgcttatcagttctccgggagctgaaaaagagcaagaagaccaactcctgcagaaagtgatgaatctgtggaagaaacaagggttgttgctgtgtggtcatctggtgtggagtcagtgggaatgggggggtctgccgtccggtaaggctgatgagggtgacggggaggcatcgtgctttctgatcctcaaactttatgatcatctggtgcgtaaaagtaaacataatatgccgactggttcgaacatgggcgagtccaaaccgtggaaagcaattaaagtagatctgctgcgttgcccccgcggcagttttgcgtttgcgatgttgcagtggaccggaagccgcatgttccgtcgcgatctgcgcgattacgcccgcgaagagaagaacatgatgctggacaatcatcaactgtatgacatgactcgtggtatccaactccctgctaaatcggaagaggaaattttcgaacatctggggcttgaatacctggaaccgttcgaacgtaacgca

SEQ ID NO: 5080 - protein, 529 aa, synthetic construct
  REGION 1..529: note = Variant of terminal deoxynucleotidyltransferase
MHHHHHHGGSGSHGIRTIDSDFGKKQQKKGDNHDSSATYEIKFHEFVLFILEEKMGATRRTFLTDLARKKGFRVENELTDEVTHIVAENLSRSEVLAWLKEHKMEKTKQFELLDISWLIESMKVGKPVDTKGKYQLAESVEVSANPDPTEGRVNELPPTMKTVSPYACQRRTTLNNRNQRFTDSLEILRENYVFKGNDDTALEFRRAISVLKSLPFEVRSLKDTEGLPWISDEVKGIMEEIIEVGESREVQAVLNDEWYQSFHAFTRVFGVGVKTADKWYRMGLRTLEDVRSSKTLKLTTWAKVGLTYYEDLARGVTRAEADAIWLLVQDAVATFDPDAIVEIVGGQRRGKPQSHDVDLLISSPGAEKEQEDQLLQKVMNLWKKQGLLLCGHLVWSQWEWGGLPSGKADEGDGEASCFLILKLYDHLVRKSKHNMPTGSNMGESKPWKAIKVDLLRCPRGSFAFAMLQWTGSRMFRRDLRDYAREEKNMMLDNHQLYDMTRGIQLPAKSEEEIFEHLGLEYLEPFERNA

SEQ ID NO: 5081 - DNA, 1587 bp, synthetic construct
  misc_feature 1..1587: note = Variant of terminal deoxynucleotidyltransferase
  source 1..1587: mol_type = other DNA
atgcaccatcatcatcatcatggcggtagcggcagccacggcattcgtaccatcgattcggacttcgggaagaaacagcagaaaaaaggcgataaccacgatagttccgccacttatgaaatcaaatttcacgagtttgtgctgttcattctcgaagaaaaaatgggtgcgacgcgtcgtacttttctgacagatttagcccgcaagaaagggttccgcgtcgagaatgaactgaccgacgaagttacccacatcgtggcagaaaatctgtcacgctctgaagtattggcttggctgaaagaacacaagatggagaagaccaagcaattcgaactgctggatattagctggcttatcgaaagcatgaaagttggtaaaccggtggacaccaaggggaaataccagttggcggaatcggttgaggtgagtgcgaacccagatccgacagaaggtcgtgtaaacgagctgcctcctactatgaaaaccgtttctccgtatgcgtgtcaacgccgcaccaccctgaacaaccgtaatcaacgttttacggactcgctggagattcttcgcgagaattacgtgtttaaaggcaacgacgatactgcgctggaatttcgtcgtgctagttccgtgctgaaaagccttccgtttgaggtacgtagcctgaaagacacggaaggattgccctggatcagtgatgaagtcaaagggattatggaagaaatcatcgaagtcggggagtcgcgtgaagtgcaggccgtgctcaatgatgagtggtatcaaagcttccacgcatttacgcgtgtctttggagtgggggtgaagacagcagacaagtggtaccgcatgggtctgcgcaccctggaggatgttcgttccagcaagaccctgaagttgaccacgtgggcgaaagtaggtctgacgtattatgaagatcttgctcgcggcgttacccgtgcggaagctgacgcgatttggctgctggttcaggatgcagtcgcaactttcgacccggatgcgatcgtggagattgtcggtggacagcgtcgtgggaaacctcagtctcacgacgttgatctgcttatcagttctccgggagctgaaaaagagcaagaagaccaactcctgcagaaagtgatgaatctgtggaagaaacaagggttgttgctgtgtggtcgtctggaatggagtcagtgggaatgggggggtctgccgtccggtaaggctgatgagggtgacggggaggcatcgtgctttctgatcctcaaactttatgatcatctggtgcgtaaaagtaaacgcaatatgccgactggttcgaacatgggcgagtccaaaccgtggaaagcaattaaagtagatctgctgcgttgcccccgcggcagttttgcgtttgcgatgttgcagtggaccggaagccgcatgttccgtcgtgatctgcgcgattacgcccgcgaagagaagaacatgatgctggacaatcatagcctgtatgacatgactcgtggtatccaactccctgctaaatcggaagaggaaattttcgaacatctggggcttgaatacctggaaccgttcgaacgtaacgca

SEQ ID NO: 5082 - protein, 529 aa, synthetic construct
  REGION 1..529: note = Variant of terminal deoxynucleotidyltransferase
MHHHHHHGGSGSHGIRTIDSDFGKKQQKKGDNHDSSATYEIKFHEFVLFILEEKMGATRRTFLTDLARKKGFRVENELTDEVTHIVAENLSRSEVLAWLKEHKMEKTKQFELLDISWLIESMKVGKPVDTKGKYQLAESVEVSANPDPTEGRVNELPPTMKTVSPYACQRRTTLNNRNQRFTDSLEILRENYVFKGNDDTALEFRRASSVLKSLPFEVRSLKDTEGLPWISDEVKGIMEEIIEVGESREVQAVLNDEWYQSFHAFTRVFGVGVKTADKWYRMGLRTLEDVRSSKTLKLTTWAKVGLTYYEDLARGVTRAEADAIWLLVQDAVATFDPDAIVEIVGGQRRGKPQSHDVDLLISSPGAEKEQEDQLLQKVMNLWKKQGLLLCGRLEWSQWEWGGLPSGKADEGDGEASCFLILKLYDHLVRKSKRNMPTGSNMGESKPWKAIKVDLLRCPRGSFAFAMLQWTGSRMFRRDLRDYAREEKNMMLDNHSLYDMTRGIQLPAKSEEEIFEHLGLEYLEPFERNA

SEQ ID NO: 5083 - DNA, 1587 bp, synthetic construct
  misc_feature 1..1587: note = Variant of terminal deoxynucleotidyltransferase
  source 1..1587: mol_type = other DNA
atgcaccatcatcatcatcatggcggtagcggcagccacggcattcgtaccatcgattcggacttcgggaagaaacagcagaaaaaaggcgataaccacgatagttccgccacttatgaaatcaaatttcacgagtttgtgctgttcattctcgaagaaaaaatgggtgcgacgcgtcgtacttttctgacagatttagcccgcaagaaagggttccgcgtcgagaatgaactgaccgacgaagttacccacatcgtggcagaaaatctgtcacgctctgaagtattggcttggctgaaagaacacaagatggagaagaccaagcaattcgaactgctggatattagctggcttatcgaaagcatgaaagttggtaaaccggtggacaccaaggggaaataccagttggcggaatcggttgaggtgagtgcgaacccagatccgacagaaggtcgtgtaaacgagctgcctcctactatgaaaaccgtttctccgtatgcgtgtcaacgccgcaccaccctgaacaaccgtaatcaacgttttacggactcgctggagattcttcgcgagaattacgtgctgaaaggcaaccaggatactgcgctggaatttcgtcgtgctatctccgtgctgaaaagccttccgtttgaggtacgtagcctgaaagacacggaaggattgccctggatcagtgatgaagtcaaagggattatggaagaaatcatcgaagtcggggagtcgcgtgaagtgcaggccgtgctcaatgatgagtggtatcaaagcttccacgcatttacgcgtgtctttggagtgggggtgaagacagcagacaagtggtaccgcatgggtctgcgcaccctggaggatgttcgttccagcaagaccctgaagttgaccacgtgggcgaaagtaggtctgacgtattatgaagatcttgctcgcggcgttacccgtgcggaagctgacgcgatttggctgctggttcaggatgcagtcgcaactttcgacccggatgcgatcgtggagattgtcggtggacagcgtcgtgggaaacctcagtctcacgacgttgatctgcttatcagttctccgggagctgaaaaagagcaagaagaccaactcctgcagaaagtgatgaatctgtggaagaaacaagggttgttgctgtgtggtcgtctggaatggagtcagtgggaatgggggggtctgccgtccggtaaggctgatgagggtgacggggaggcatcgtgctttctgatcctcaaactttatgatcatctggtgcgtaaaagtaaacgcaatatgccgactggttcgaacatgggcgagtccaaaccgtggaaagcaattaaagtagatctgctgcgttgcccccgcggcagttttgcgtttgcgatgttgcagtggaccggaagccgcatgttccgtcgtgatctgcgcgattacgcccgcgaagagaagaacatgatgctggacaatcatagcctgtatgacatgactcgtggtatccaactccctgctaaatcggaagaggaaattttcgaacatctggggcttgaatacctggaaccgttcgaacgtaacgca

SEQ ID NO: 5084 - protein, 529 aa, synthetic construct
  REGION 1..529: note = Variant of terminal deoxynucleotidyltransferase
MHHHHHHGGSGSHGIRTIDSDFGKKQQKKGDNHDSSATYEIKFHEFVLFILEEKMGATRRTFLTDLARKKGFRVENELTDEVTHIVAENLSRSEVLAWLKEHKMEKTKQFELLDISWLIESMKVGKPVDTKGKYQLAESVEVSANPDPTEGRVNELPPTMKTVSPYACQRRTTLNNRNQRFTDSLEILRENYVLKGNQDTALEFRRAISVLKSLPFEVRSLKDTEGLPWISDEVKGIMEEIIEVGESREVQAVLNDEWYQSFHAFTRVFGVGVKTADKWYRMGLRTLEDVRSSKTLKLTTWAKVGLTYYEDLARGVTRAEADAIWLLVQDAVATFDPDAIVEIVGGQRRGKPQSHDVDLLISSPGAEKEQEDQLLQKVMNLWKKQGLLLCGRLEWSQWEWGGLPSGKADEGDGEASCFLILKLYDHLVRKSKRNMPTGSNMGESKPWKAIKVDLLRCPRGSFAFAMLQWTGSRMFRRDLRDYAREEKNMMLDNHSLYDMTRGIQLPAKSEEEIFEHLGLEYLEPFERNA

SEQ ID NO: 5085 - DNA, 1587 bp, synthetic construct
  misc_feature 1..1587: note = Variant of terminal deoxynucleotidyltransferase
  source 1..1587: mol_type = other DNA
atgcaccatcatcatcatcatggcggtagcggcagccacggcattcgtaccatcgattcggacttcgggaagaaacagcagaaaaaaggcgataaccacgatagttccgccacttatgaaatcaaatttcacgagtttgtgctgttcattctcgaagaaaaaatgggtgcgacgcgtcgtacttttctgacagatttagcccgcaagaaagggttccgcgtcgagaatgaactgaccgacgaagttacccacatcgtggcagaaaatctgtcacgctctgaagtattggcttggctgaaagaacacaagatggagaagaccaagcaattcgaactgctggatattagctggcttatcgaaagcatgaaagttggtaaaccggtggacaccaaggggaaataccagttggcggaatcggttgaggtgagtgcgaacccagatccgacagaaggtcgtgtaaacgagctgcctcctactatgaaaaccgtttctccgtatgcgtgtcaacgccgcaccaccctgaacaaccgtaatcaacgttttacggactcgctggagattcttcgcgagaattacgtgtttaaaggcaacgacgatactgcgctggaatttcgtcgtgctatctccgtgctgaaaagccttccgtttgaggtacgtagcctgaaagacacggaaggattgccctggatcagtgatgaagtcaaagggattatggaagaaatcatcgaagtcggggagtcgcgtgaagtgcaggccgtgctcaatgatgagtggtatcaaagcttccacgcatttacgcgtgtctttggagtgggggtgaagacagcagacaagtggtaccgcatgggtctgcgcaccctggaggatgttcgttccagcaagaccctgaagttgaccacgtgggcgaaagtaggtctgacgtattatgaagatcttgctcgcggcgttacccgtgcggaagctgacgcgatttggctgctggttcaggatgcagtcgcaactttcgacccggatgcgatcgtggagattgtcggtggacagcgtcgtgggaaacctcagtctcacgacgttgatctgcttatcagttctccgggagctgaaaaagagcaagaagaccaactcctgcagaaagtgatgaatctgtggaagaaacaagggttgttgctgtgtggtcgtctggaatggagtcagtgggaatgggggggtctgccgtccggtaaggctgatgagggtgacggggaggcatcgtgctttctgatcctcaaactttatgatcatctggtgcgtaaaagtaaacgcaatatgccgactggttcgaacatgggcgagtccaaaccgtggaaagcaattaaagtagatctgctgcgttgcccccgcggcagttttgcgtttgcggtgttgcagtggaccggaagccgcatgttccgtcgtgatctgcgcgattacgcccgcgaagagaagaacatgatgctggacaatcatagcctgtatgacatgactcgtggtatccaactccctgctaaatcggaagaggaaattttcgaacatctggggcttgaatacctggaaccgttcgaacgtaacgca

SEQ ID NO: 5086 - protein, 529 aa, synthetic construct
  REGION 1..529: note = Variant of terminal deoxynucleotidyltransferase
MHHHHHHGGSGSHGIRTIDSDFGKKQQKKGDNHDSSATYEIKFHEFVLFILEEKMGATRRTFLTDLARKKGFRVENELTDEVTHIVAENLSRSEVLAWLKEHKMEKTKQFELLDISWLIESMKVGKPVDTKGKYQLAESVEVSANPDPTEGRVNELPPTMKTVSPYACQRRTTLNNRNQRFTDSLEILRENYVFKGNDDTALEFRRAISVLKSLPFEVRSLKDTEGLPWISDEVKGIMEEIIEVGESREVQAVLNDEWYQSFHAFTRVFGVGVKTADKWYRMGLRTLEDVRSSKTLKLTTWAKVGLTYYEDLARGVTRAEADAIWLLVQDAVATFDPDAIVEIVGGQRRGKPQSHDVDLLISSPGAEKEQEDQLLQKVMNLWKKQGLLLCGRLEWSQWEWGGLPSGKADEGDGEASCFLILKLYDHLVRKSKRNMPTGSNMGESKPWKAIKVDLLRCPRGSFAFAVLQWTGSRMFRRDLRDYAREEKNMMLDNHSLYDMTRGIQLPAKSEEEIFEHLGLEYLEPFERNA

SEQ ID NO: 5087 - DNA, 1587 bp, synthetic construct
  misc_feature 1..1587: note = Variant of terminal deoxynucleotidyltransferase
  source 1..1587: mol_type = other DNA
atgcaccatcatcatcatcatggcggtagcggcagccacggcattcgtaccatcgattcggacttcgggaagaaacagcagaaaaaaggcgataaccacgatagttccgccacttatgaaatcaaatttcacgagtttgtgctgttcattctcgaagaaaaaatgggtgcgacgcgtcgtacttttctgacagatttagcccgcaagaaagggttccgcgtcgagaatgaactgaccgacgaagttacccacatcgtggcagaaaatctgtcacgctctgaagtattggcttggctgaaagaacacaagatggagaagaccaagcaattcgaactgctggatattagctggcttatcgaaagcatgaaagttggtaaaccggtggacaccaaggggaaataccagttggcggaatcggttgaggtgagtgcgaacccagatccgacagaaggtcgtgtaaacgagctgcctcctactatgaaaaccgtttctccgtatgcgtgtcaacgccgcaccaccctgaacaaccgtaatcaacgttttacggactcgctggagattcttcgcgagaattacgtgctgaaaggcaacgtggatactgcgctggaatttcgtcgtgctatctccgtgctgaaaagccttccgtttgaggtacgtagcctgaaagacacggaaggattgccctggatcagtgatgaagtcaaagggattatggaagaaatcatcgaagtcggggagtcgcgtgaagtgcaggccgtgctcaatgatgagtggtatcaaagcttccacgcatttacgcgtgtctttggagtgggggtgaagacagcagacaagtggtaccgcatgggtctgcgcaccctggaggatgttcgttccagcaagaccctgaagttgaccacgtgggcgaaagtaggtctgacgtattatgaagatcttgctcgcggcgttacccgtgcggaagctgacgcgatttggctgctggttcaggatgcagtcgcaactttcgacccggatgcgatcgtggagattgtcggtggacagcgtcgtgggaaacctcagtctcacgacgttgatctgcttatcagttctccgggagctgaaaaagagcaagaagaccaactcctgcagaaagtgatgaatctgtggaagaaacaagggttgttgctgtgtggtcgtctggaatggagtcagtgggaatgggggggtctgccgtccggtaaggctgatgagggtgacggggaggcatcgtgctttctgatcctcaaactttatgatcatctggtgcgtaaaagtaaacgcaatatgccgactggttcgaacatgggcgagtccaaaccgtggaaagcaattaaagtagatctgctgcgttgcccccgcggcagttttgcgtttgcgatgttgcagtggaccggaagccgcatgttccgtcgtgatctgcgcgattacgcccgcgaagagaagaacatgatgctggacaatcatagcctgtatgacatgactcgtggtatccaactccctgctaaatcggaagaggaaattttcgaacatctggggcttgaatacctggaaccgttcgaacgtaacgca

SEQ ID NO: 5088 - protein, 529 aa, synthetic construct
  REGION 1..529: note = Variant of terminal deoxynucleotidyltransferase
MHHHHHHGGSGSHGIRTIDSDFGKKQQKKGDNHDSSATYEIKFHEFVLFILEEKMGATRRTFLTDLARKKGFRVENELTDEVTHIVAENLSRSEVLAWLKEHKMEKTKQFELLDISWLIESMKVGKPVDTKGKYQLAESVEVSANPDPTEGRVNELPPTMKTVSPYACQRRTTLNNRNQRFTDSLEILRENYVLKGNVDTALEFRRAISVLKSLPFEVRSLKDTEGLPWISDEVKGIMEEIIEVGESREVQAVLNDEWYQSFHAFTRVFGVGVKTADKWYRMGLRTLEDVRSSKTLKLTTWAKVGLTYYEDLARGVTRAEADAIWLLVQDAVATFDPDAIVEIVGGQRRGKPQSHDVDLLISSPGAEKEQEDQLLQKVMNLWKKQGLLLCGRLEWSQWEWGGLPSGKADEGDGEASCFLILKLYDHLVRKSKRNMPTGSNMGESKPWKAIKVDLLRCPRGSFAFAMLQWTGSRMFRRDLRDYAREEKNMMLDNHSLYDMTRGIQLPAKSEEEIFEHLGLEYLEPFERNA

SEQ ID NO: 5089 - DNA, 1587 bp, synthetic construct
  misc_feature 1..1587: note = Variant of terminal deoxynucleotidyltransferase
  source 1..1587: mol_type = other DNA
atgcaccatcatcatcatcatggcggtagcggcagccacggcattcgtaccatcgattcggacttcgggaagaaacagcagaaaaaaggcgataaccacgatagttccgccacttatgaaatcaaatttcacgagtttgtgctgttcattctcgaagaaaaaatgggtgcgacgcgtcgtacttttctgacagatttagcccgcaagaaagggttccgcgtcgagaatgaactgaccgacgaagttacccacatcgtggcagaaaatctgtcacgctctgaagtattggcttggctgaaagaacacaagatggagaagaccaagcaattcgaactgctggatattagctggcttatcgaaagcatgaaagttggtaaaccggtggacaccaaggggaaataccagttggcggaatcggttgaggtgagtgcgaacccagatccgacagaaggtcgtgtaaacgagctgcctcctactatgaaaaccgtttctccgtatgcgtgtcaacgccgcaccaccctgaacaaccgtaatcaacgttttacggactcgctggagattcttcgcgagaattacgtgtttaaaggcaacgacgatactgcgctggaatttcgtcgtgctatctccgtgctgaaaagccttccgtttgaggtacgtagcctgaaagacacggaaggattgccctggatcagtgatgaagtcaaagggattatggaagaaatcatcgaagtcggggagtcgcgtgaagtgcaggccgtgctcaatgatgagtggtatcaaagcttccacgcatttacgcgtgtctttggagtgggggtgaagacagcagacaagtggtaccgcatgggtctgcgcaccctggaggatgttcgttccagcaagaccctgaagttgaccacgtgggcgaaagtaggtctgacgtattatgaagatcttgctcgcggcgttacccgtgcggaagctgacgcgatttggctgctggttcaggatgcagtcgcaactttcgacccggatgcgatcgtggagattgtcggtggacagcgtcgtgggaaacctcagtctcacgacgttgatctgcttatcagttctccgggagctgaaaaagagcaagaagaccaactcctgcagaaagtgatgaatctgtggaagaaacaagggttgttgctgtgtggtcgtctggaatggagtcagtgggaatgggggggtctgccgtccggtaaggctgatgagctggacgcggaggcgtcgtgctttctgatcctcaaactttatgatcatctggtgcgtaaaagtaaacgcaatatgccgactggttcgaacatgggcgagtccaaaccgtggaaagcaattaaagtagatctgctgcgttgcccccgcggcagttttgcgtttgcgatgttgcagtggaccggaagccgcatgttccgtcgtgatctgcgcgattacgcccgcgaagagaagaacatgatgctggacaatcatagcctgtatgacatgactcgtggtatccaactccctgctaaatcggaagaggaaattttcgaacatctggggcttgaatacctggaaccgttcgaacgtaacgca

SEQ ID NO: 5090 - protein, 529 aa, synthetic construct
  REGION 1..529: note = Variant of terminal deoxynucleotidyltransferase
MHHHHHHGGSGSHGIRTIDSDFGKKQQKKGDNHDSSATYEIKFHEFVLFILEEKMGATRRTFLTDLARKKGFRVENELTDEVTHIVAENLSRSEVLAWLKEHKMEKTKQFELLDISWLIESMKVGKPVDTKGKYQLAESVEVSANPDPTEGRVNELPPTMKTVSPYACQRRTTLNNRNQRFTDSLEILRENYVFKGNDDTALEFRRAISVLKSLPFEVRSLKDTEGLPWISDEVKGIMEEIIEVGESREVQAVLNDEWYQSFHAFTRVFGVGVKTADKWYRMGLRTLEDVRSSKTLKLTTWAKVGLTYYEDLARGVTRAEADAIWLLVQDAVATFDPDAIVEIVGGQRRGKPQSHDVDLLISSPGAEKEQEDQLLQKVMNLWKKQGLLLCGRLEWSQWEWGGLPSGKADELDAEASCFLILKLYDHLVRKSKRNMPTGSNMGESKPWKAIKVDLLRCPRGSFAFAMLQWTGSRMFRRDLRDYAREEKNMMLDNHSLYDMTRGIQLPAKSEEEIFEHLGLEYLEPFERNA

SEQ ID NO: 5091 - DNA, 1587 bp, synthetic construct
  misc_feature 1..1587: note = Variant of terminal deoxynucleotidyltransferase
  source 1..1587: mol_type = other DNA
atgcaccatcatcatcatcatggcggtagcggcagccacggcattcgtaccatcgattcggacttcgggaagaaacagcagaaaaaaggcgataaccacgatagttccgccacttatgaaatcaaatttcacgagtttgtgctgttcattctcgaagaaaaaatgggtgcgacgcgtcgtacttttctgacagatttagcccgcaagaaagggttccgcgtcgagaatgaactgaccgacgaagttacccacatcgtggcagaaaatctgtcacgctctgaagtattggcttggctgaaagaacacaagatggagaagaccaagcaattcgaactgctggatattagctggcttatcgaaagcatgaaagttggtaaaccggtggacaccaaggggaaataccagttggcggaatcggttgaggtgagtgcgaacccagatccgacagaaggtcgtgtaaacgagctgcctcctactatgaaaaccgtttctccgtatgcgtgtcaacgccgcaccaccctgaacaaccgtaatcaacgttttacggactcgctggagattcttcgcgagaattacgtgtttaaaggcaacgacgatactgcgctggaatttcgtcgtgctatctccgtgctgaaaagccttccgtttgaggtacgtagcctgaaagacacggaaggattgccctggatcagtgatgaagtcaaagggattatggaagaaatcatcgaagtcggggagtcgcgtgaagtgcaggccgtgctcaatgatgagtggtatcaaagcttccacgcatttacgcgtgtctttggagtgggggtgaagacagcagacaagtggtaccgcatgggtctgcgcaccctggaggatgttcgttccagcaagaccctgaagttgaccacgtgggcgaaagtaggtctgacgtattatgaagatcttgctcgcggcgttacccgtgcggaagctgacgcgatttggctgctggttcaggatgcagtcgcaactttcgacccggatgcgatcgtggagattgtcggtggacagcgtcgtgggaaacctcagtctcacgacgttgattgtcttatcagttctccgggagctgaaaaagagcaagaagaccaactcctgcagaaagtgatgaatctgtggaagaaacaagggttgttgctgtgtggtcgtctggaatggagtcagtgggaatgggggggtctgccgtccggtaaggctgatgagggtgacggggaggcatcgtgctttctgatcctcaaactttatgatcatctggtgcgtaaaagtaaacgcaatatgccgactggttcgaacatgggcgagtccaaaccgtggaaagcaattaaagtagatctgctgcgttgcccccgcggcagttttgcgtttgcgatgttgcagtggaccggaagccgcatgttccgtcgtgatctgcgcgattacgcccgcgaagagaagaacatgatgctggacaatcatagcctgtatgacatgactcgtggtatccaactccctgctaaatcggaagaggaaattttcgaacatctggggcttgaatacctggaaccgttcgaacgtaacgca

SEQ ID NO: 5092 - protein, 529 aa, synthetic construct
  REGION 1..529: note = Variant of terminal deoxynucleotidyltransferase
MHHHHHHGGSGSHGIRTIDSDFGKKQQKKGDNHDSSATYEIKFHEFVLFILEEKMGATRRTFLTDLARKKGFRVENELTDEVTHIVAENLSRSEVLAWLKEHKMEKTKQFELLDISWLIESMKVGKPVDTKGKYQLAESVEVSANPDPTEGRVNELPPTMKTVSPYACQRRTTLNNRNQRFTDSLEILRENYVFKGNDDTALEFRRAISVLKSLPFEVRSLKDTEGLPWISDEVKGIMEEIIEVGESREVQAVLNDEWYQSFHAFTRVFGVGVKTADKWYRMGLRTLEDVRSSKTLKLTTWAKVGLTYYEDLARGVTRAEADAIWLLVQDAVATFDPDAIVEIVGGQRRGKPQSHDVDCLISSPGAEKEQEDQLLQKVMNLWKKQGLLLCGRLEWSQWEWGGLPSGKADEGDGEASCFLILKLYDHLVRKSKRNMPTGSNMGESKPWKAIKVDLLRCPRGSFAFAMLQWTGSRMFRRDLRDYAREEKNMMLDNHSLYDMTRGIQLPAKSEEEIFEHLGLEYLEPFERNA

SEQ ID NO: 5093 - DNA, 1587 bp, synthetic construct
  misc_feature 1..1587: note = Variant of terminal deoxynucleotidyltransferase
  source 1..1587: mol_type = other DNA
atgcaccatcatcatcatcatggcggtagcggcagccacggcattcgtaccatcgattcggacttcgggaagaaacagcagaaaaaaggcgataaccacgatagttccgccacttatgaaatcaaatttcacgagtttgtgctgttcattctcgaagaaaaaatgggtgcgacgcgtcgtacttttctgacagatttagcccgcaagaaagggttccgcgtcgagaatgaactgaccgacgaagttacccacatcgtggcagaaaatctgtcacgctctgaagtattggcttggctgaaagaacacaagatggagaagaccaagcaattcgaactgctggatattagctggcttatcgaaagcatgaaagttggtaaaccggtggacaccaaggggaaataccagttggcggaatcggttgaggtgagtgcgaacccagatccgacagaaggtcgtgtaaacgagctgcctcctactatgaaaaccgtttctccgtatgcgtgtcaacgccgcaccaccctgaacaaccgtaatcaacgttttacggactcgctggagattcttcgcgagaattacgtgctgaaaggcaacggggatactgcgctggaatttcgtcgtgctatctccgtgctgaaaagccttccgtttgaggtacgtagcctgaaagacacggaaggattgccctggatcagtgatgaagtcaaagggattatggaagaaatcatcgaagtcggggagtcgcgtgaagtgcaggccgtgctcaatgatgagtggtatcaaagcttccacgcatttacgcgtgtctttggagtgggggtgaagacagcagacaagtggtaccgcatgggtctgcgcaccctggaggatgttcgttccagcaagaccctgaagttgaccacgtgggcgaaagtaggtctgacgtattatgaagatcttgctcgcggcgttacccgtgcggaagctgacgcgatttggctgctggttcaggatgcagtcgcaactttcgacccggatgcgatcgtggagattgtcggtggacagcgtcgtgggaaacctcagtctcacgacgttgatctgcttatcagttctccgggagctgaaaaagagcaagaagaccaactcctgcagaaagtgatgaatctgtggaagaaacaagggttgttgctgtgtggtcgtctggaatggagtcagtgggaatgggggggtctgccgtccggtaaggctgatgagggtgacggggaggcatcgtgctttctgatcctcaaactttatgatcatctggtgcgtaaaagtaaacgcaatatgccgactggttcgaacatgggcgagtccaaaccgtggaaagcaattaaagtagatctgctgcgttgcccccgcggcagttttgcgtttgcgatgttgcagtggaccggaagccgcatgttccgtcgtgatctgcgcgattacgcccgcgaagagaagaacatgatgctggacaatcatagcctgtatgacatgactcgtggtatccaactccctgctaaatcggaagaggaaattttcgaacatctggggcttgaatacctggaaccgttcgaacgtaacgca

SEQ ID NO: 5094 - protein, 529 aa, synthetic construct
  REGION 1..529: note = Variant of terminal deoxynucleotidyltransferase
MHHHHHHGGSGSHGIRTIDSDFGKKQQKKGDNHDSSATYEIKFHEFVLFILEEKMGATRRTFLTDLARKKGFRVENELTDEVTHIVAENLSRSEVLAWLKEHKMEKTKQFELLDISWLIESMKVGKPVDTKGKYQLAESVEVSANPDPTEGRVNELPPTMKTVSPYACQRRTTLNNRNQRFTDSLEILRENYVLKGNGDTALEFRRAISVLKSLPFEVRSLKDTEGLPWISDEVKGIMEEIIEVGESREVQAVLNDEWYQSFHAFTRVFGVGVKTADKWYRMGLRTLEDVRSSKTLKLTTWAKVGLTYYEDLARGVTRAEADAIWLLVQDAVATFDPDAIVEIVGGQRRGKPQSHDVDLLISSPGAEKEQEDQLLQKVMNLWKKQGLLLCGRLEWSQWEWGGLPSGKADEGDGEASCFLILKLYDHLVRKSKRNMPTGSNMGESKPWKAIKVDLLRCPRGSFAFAMLQWTGSRMFRRDLRDYAREEKNMMLDNHSLYDMTRGIQLPAKSEEEIFEHLGLEYLEPFERNA

SEQ ID NO: 5095 - DNA, 1587 bp, synthetic construct
  misc_feature 1..1587: note = Variant of terminal deoxynucleotidyltransferase
  source 1..1587: mol_type = other DNA
atgcaccatcatcatcatcatggcggtagcggcagccacggcattcgtaccatcgattcggacttcgggaagaaacagcagaaaaaaggcgataaccacgatagttccgccacttatgaaatcaaatttcacgagtttgtgctgttcattctcgaagaaaaaatgggtgcgacgcgtcgtacttttctgacagatttagcccgcaagaaagggttccgcgtcgagaatgaactgaccgacgaagttacccacatcgtggcagaaaatctgtcacgctctgaagtattggcttggctgaaagaacacaagatggagaagaccaagcaattcgaactgctggatattagctggcttatcgaaagcatgaaagttggtaaaccggtggacaccaaggggaaataccagttggcggaatcggttgaggtgagtgcgaacccagatccgacagaaggtcgtgtaaacgagctgcctcctactatgaaaaccgtttctccgtatgcgtgtcaacgccgcaccaccctgaacaaccgtaatcaacgttttacggactcgctggagattcttcgcgagaattacgtgtttaaaggcaacgacgatactgcgctggaatttcgtcgtgctatctccgtgctgaaaagccttccgtttgaggtacgtagcctgaaagacacggaaggattgccctggatcagtgatgaagtcaaagggattatggaagaaatcatcgaagtcggggagtcgcgtgaagtgcaggccgtgctcaatgatgagtggtatcaaagcttccacgcatttacgcgtgtctttggagtgggggtgaagacagcagacaagtggtaccgcatgggtctgcgcaccctggaggatgttcgttccagcaagaccctgaagttgaccacgtgggcgaaagtaggtctgacgtattatgaagatcttgctcgcggcgttacccgtgcggaagctgacgcgatttggctgctggttcaggatgcagtcgcaactttcgacccggatgcgatcgtggagattgtcggtggacagcgtcgtgggaaacctcagtctcacgacgttgatctgcttatcagttctccgggagctgaaaaagagcaagaagaccaactcctgcagaaagtgatgaatctgtggaagaaacaagggttgttgctgtgtggtcgtctggaatggagtcagtgggaatgggggggtctgccgtccggtaaggctgatgagggtgacggggaggcatcgtgctttctgatcctcaaactttatgatcatctggtgcgtaaaagtaaacgcaatatgccgactggttcgaacatgggcgagtccaaaccgtggaaagcaattaaagtagatctgctgcgttgcccccgcggcagttttgcgtttgcgatgttgcagtggaccggaagccgcatgttccgtcgtgatctgcgcgattacgcccgcgaagagaagaacatgatgctggacaatcatagcctgtatgacatgactcgtggtatccaactccctgctaaatcggaagaggaaattttcgaacatctggggcttgaatacctgacgccgttcgaacgtaacgca

SEQ ID NO: 5096 - protein, 529 aa, synthetic construct
  REGION 1..529: note = Variant of terminal deoxynucleotidyltransferase
MHHHHHHGGSGSHGIRTIDSDFGKKQQKKGDNHDSSATYEIKFHEFVLFILEEKMGATRRTFLTDLARKKGFRVENELTDEVTHIVAENLSRSEVLAWLKEHKMEKTKQFELLDISWLIESMKVGKPVDTKGKYQLAESVEVSANPDPTEGRVNELPPTMKTVSPYACQRRTTLNNRNQRFTDSLEILRENYVFKGNDDTALEFRRAISVLKSLPFEVRSLKDTEGLPWISDEVKGIMEEIIEVGESREVQAVLNDEWYQSFHAFTRVFGVGVKTADKWYRMGLRTLEDVRSSKTLKLTTWAKVGLTYYEDLARGVTRAEADAIWLLVQDAVATFDPDAIVEIVGGQRRGKPQSHDVDLLISSPGAEKEQEDQLLQKVMNLWKKQGLLLCGRLEWSQWEWGGLPSGKADEGDGEASCFLILKLYDHLVRKSKRNMPTGSNMGESKPWKAIKVDLLRCPRGSFAFAMLQWTGSRMFRRDLRDYAREEKNMMLDNHSLYDMTRGIQLPAKSEEEIFEHLGLEYLTPFERNA

SEQ ID NO: 5097 - DNA, 1587 bp, synthetic construct
  misc_feature 1..1587: note = Variant of terminal deoxynucleotidyltransferase
  source 1..1587: mol_type = other DNA
atgcaccatcatcatcatcatggcggtagcggcagccacggcattcgtaccatcgattcggacttcgggaagaaacagcagaaaaaaggcgataaccacgatagttccgccacttatgaaatcaaatttcacgagtttgtgctgttcattctcgaagaaaaaatgggtgcgacgcgtcgtacttttctgacagatttagcccgcaagaaagggttccgcgtcgagaatgaactgaccgacgaagttacccacatcgtggcagaaaatctgtcacgctctgaagtattggcttggctgaaagaacacaagatggagaagaccaagcaattcgaactgctggatattagctggcttatcgaaagcatgaaagttggtaaaccggtggacaccaaggggaaataccagttggcggaatcggttgaggtgagtgcgaacccagatccgacagaaggtcgtgtaaacgagctgcctcctactatgaaaaccgtttctccgtatgcgtgtcaacgccgcaccaccctgaacaaccgtaatcaacgttttacggactcgctggagattcttcgcgagaattacgtgtttaaaggcaacgacgatactgcgctggaatttcgtcgtgctatctccgtgctgaaaagccttccgtttgaggtacgtagcctgaaagacacggaaggattgccctggatcagtgatgaagtcaaagggattatggaagaaatcatcgaagtcggggagtcgcgtgaagtgcaggccgtgctcaatgatgagtggtatcaaagcttccacgcatttacgcgtgtctttggagtgggggtgaagacagcagacaagtggtaccgcatgggtctgcgcaccctggaggatgttcgttccagcaagaccctgaagttgaccacgtgggcgaaagtaggtctgacgtattatgaagatcttagtcgcggcgttacgcgtgcggaagctgacgcgatttggctgctggttcaggatgcagtcgcaactttcgacccggatgcgatcgtggagattgtcggtggacagcgtcgtgggaaacctcagtctcacgacgttgatctgcttatcagttctccgggagctgaaaaagagcaagaagaccaactcctgcagaaagtgatgaatctgtggaagaaacaagggttgttgctgtgtggtcgtctggaatggagtcagtgggaatgggggggtctgccgtccggtaaggctgatgagggtgacggggaggcatcgtgctttctgatcctcaaactttatgatcatctggtgcgtaaaagtaaacgcaatatgccgactggttcgaacatgggcgagtccaaaccgtggaaagcaattaaagtagatctgctgcgttgcccccgcggcagttttgcgtttgcgatgttgcagtggaccggaagccgcatgttccgtcgtgatctgcgcgattacgcccgcgaagagaagaacatgatgctggacaatcatagcctgtatgacatgactcgtggtatccaactccctgctaaatcggaagaggaaattttcgaacatctggggcttgaatacctggaaccgttcgaacgtaacgca

SEQ ID NO: 5098 - protein, 529 aa, synthetic construct
  REGION 1..529: note = Variant of terminal deoxynucleotidyltransferase
MHHHHHHGGSGSHGIRTIDSDFGKKQQKKGDNHDSSATYEIKFHEFVLFILEEKMGATRRTFLTDLARKKGFRVENELTDEVTHIVAENLSRSEVLAWLKEHKMEKTKQFELLDISWLIESMKVGKPVDTKGKYQLAESVEVSANPDPTEGRVNELPPTMKTVSPYACQRRTTLNNRNQRFTDSLEILRENYVFKGNDDTALEFRRAISVLKSLPFEVRSLKDTEGLPWISDEVKGIMEEIIEVGESREVQAVLNDEWYQSFHAFTRVFGVGVKTADKWYRMGLRTLEDVRSSKTLKLTTWAKVGLTYYEDLSRGVTRAEADAIWLLVQDAVATFDPDAIVEIVGGQRRGKPQSHDVDLLISSPGAEKEQEDQLLQKVMNLWKKQGLLLCGRLEWSQWEWGGLPSGKADEGDGEASCFLILKLYDHLVRKSKRNMPTGSNMGESKPWKAIKVDLLRCPRGSFAFAMLQWTGSRMFRRDLRDYAREEKNMMLDNHSLYDMTRGIQLPAKSEEEIFEHLGLEYLEPFERNA

SEQ ID NO: 5099 - DNA, 1587 bp, synthetic construct
  misc_feature 1..1587: note = Variant of terminal deoxynucleotidyltransferase
  source 1..1587: mol_type = other DNA
atgcaccatcatcatcatcatggcggtagcggcagccacggcattcgtaccatcgattcggacttcgggaagaaacagcagaaaaaaggcgataaccacgatagttccgccacttatgaaatcaaatttcacgagtttgtgctgttcattctcgaagaaaaaatgggtgcgacgcgtcgtacttttctgacagatttagcccgcaagaaagggttccgcgtcgagaatgaactgaccgacgaagttacccacatcgtggcagaaaatctgtcacgctctgaagtattggcttggctgaaagaacacaagatggagaagaccaagcaattcgaactgctggatattagctggcttatcgaaagcatgaaagttggtaaaccggtggacaccaaggggaaataccagttggcggaatcggttgaggtgagtgcgaacccagatccgacagaaggtcgtgtaaacgagctgcctcctactatgaaaaccgtttctccgtatgcgtgtcaacgccgcaccaccctgaacaaccgtaatcaacgttttacggactcgctggagattcttcgcgagaattacgtgtttaaaggcaacgacgatactgcgctggaatttcgtcgtgctatctccgtgctgaaaagccttccgtttgaggtacgtagcctgaaagacacggaaggattgccctggatcagtgatgaagtcaaagggattatggaagaaatcatcgaagtcggggagtcgcgtgaagtgcaggccgtgctcaatgatgagtggtatcaaagcttccacgcatttacgcgtgtctttggagtggggtctaagacagcagacaagtggtaccgcatgggtctgcgcaccctggaggatgttcgttccagcaagaccctgaagttgaccacgtgggcgaaagtaggtctgacgtattatgaagatcttgctcgcggcgttacccgtgcggaagctgacgcgatttggctgctggttcaggatgcagtcgcaactttcgacccggatgcgatcgtggagattgtcggtggacagcgtcgtgggaaacctcagtctcacgacgttgatctgcttatcagttctccgggagctgaaaaagagcaagaagaccaactcctgcagaaagtgatgaatctgtggaagaaacaagggttgttgctgtgtggtcgtctggaatggagtcagtgggaatgggggggtctgccgtccggtaaggctgatgagggtgacggggaggcatcgtgctttctgatcctcaaactttatgatcatctggtgcgtaaaagtaaacgcaatatgccgactggttcgaacatgggcgagtccaaaccgtggaaagcaattaaagtagatctgctgcgttgcccccgcggcagttttgcgtttgcgatgttgcagtggaccggaagccgcatgttccgtcgtgatctgcgcgattacgcccgcgaagagaagaacatgatgctggacaatcatagcctgtatgacatgactcgtggtatccaactccctgctaaatcggaagaggaaattttcgaacatctggggcttgaatacctggaaccgttcgaacgtaacgca

SEQ ID NO: 5100 - protein, 529 aa, synthetic construct
  REGION 1..529: note = Variant of terminal deoxynucleotidyltransferase
MHHHHHHGGSGSHGIRTIDSDFGKKQQKKGDNHDSSATYEIKFHEFVLFILEEKMGATRRTFLTDLARKKGFRVENELTDEVTHIVAENLSRSEVLAWLKEHKMEKTKQFELLDISWLIESMKVGKPVDTKGKYQLAESVEVSANPDPTEGRVNELPPTMKTVSPYACQRRTTLNNRNQRFTDSLEILRENYVFKGNDDTALEFRRAISVLKSLPFEVRSLKDTEGLPWISDEVKGIMEEIIEVGESREVQAVLNDEWYQSFHAFTRVFGVGSKTADKWYRMGLRTLEDVRSSKTLKLTTWAKVGLTYYEDLARGVTRAEADAIWLLVQDAVATFDPDAIVEIVGGQRRGKPQSHDVDLLISSPGAEKEQEDQLLQKVMNLWKKQGLLLCGRLEWSQWEWGGLPSGKADEGDGEASCFLILKLYDHLVRKSKRNMPTGSNMGESKPWKAIKVDLLRCPRGSFAFAMLQWTGSRMFRRDLRDYAREEKNMMLDNHSLYDMTRGIQLPAKSEEEIFEHLGLEYLEPFERNA

SEQ ID NO: 5101 - DNA, 1587 bp, synthetic construct
  misc_feature 1..1587: note = Variant of terminal deoxynucleotidyltransferase
  source 1..1587: mol_type = other DNA
atgcaccatcatcatcatcatggcggtagcggcagccacggcattcgtaccatcgattcggacttcgggaagaaacagcagaaaaaaggcgataaccacgatagttccgccacttatgaaatcaaatttcacgagtttgtgctgttcattctcgaagaaaaaatgggtgcgacgcgtcgtacttttctgacagatttagcccgcaagaaagggttccgcgtcgagaatgaactgaccgacgaagttacccacatcgtggcagaaaatctgtcacgctctgaagtattggcttggctgaaagaacacaagatggagaagaccaagcaattcgaactgctggatattagctggcttatcgaaagcatgaaagttggtaaaccggtggacaccaaggggaaataccagttggcggaatcggttgaggtgagtgcgaacccagatccgacagaaggtcgtgtaaacgagctgcctcctactatgaaaaccgtttctccgtatgcgtgtcaacgccgcaccaccctgaacaaccgtaatcaacgttttacggactcgctggagattcttcgcgagaattacgtgtttaaaggcaacgacgatactgcgctggaatttcgtcgtgctatctccgtgctgaaaagccttccgtttgaggtacgtagcctgaaagacacggaaggattgccctggatcagtgatgaagtcaaagggattatggaagaaatcatcgaagtcggggagtcgcgtgaagtgcaggccgtgctcaatgatgagtggtatcaaagcttccacgcatttacgcgtgtctttggagtgggggtgaagacagcagacaagtggtaccgcatgggtctgcgcaccctggaggatgttcgttccagcaagaccctgaagtttaccacgtggtcgaaagtaggtctgacgtattatgaagatcttgctcgcggcgttacccgtgcggaagctgacgcgatttggctgctggttcaggatgcagtcgcaactttcgacccggatgcgatcgtggagattgtcggtggacagcgtcgtgggaaacctcagtctcacgacgttgatctgcttatcagttctccgggagctgaaaaagagcaagaagaccaactcctgcagaaagtgatgaatctgtggaagaaacaagggttgttgctgtgtggtaaactggcgtggagtcagtgggaatgggggggtctgccgtccggtaaggctgatgagggtgacggggaggcatcgtgctttctgatcctcaaactttatgatcatctggtgcgtaaaagtaaacgcaatatgccgactggttcgaacatgggcgagtccaaaccgtggaaagcaattaaagtagatctgctgcgttgcccccgcggcagttttgcgtttgcgatgttgcagtggaccggaagccgcatgttccgtcgtgatctgcgcgattacgcccgcgaagagaagaacatgatgctggacaatcatagcctgtatgacatgactcgtggtatccaactccctgctaaatcggaagaggaaattttcgaacatctggggcttgaatacctggaaccgttcgaacgtaacgca

SEQ ID NO: 5102 - protein, 529 aa, synthetic construct
  REGION 1..529: note = Variant of terminal deoxynucleotidyltransferase
MHHHHHHGGSGSHGIRTIDSDFGKKQQKKGDNHDSSATYEIKFHEFVLFILEEKMGATRRTFLTDLARKKGFRVENELTDEVTHIVAENLSRSEVLAWLKEHKMEKTKQFELLDISWLIESMKVGKPVDTKGKYQLAESVEVSANPDPTEGRVNELPPTMKTVSPYACQRRTTLNNRNQRFTDSLEILRENYVFKGNDDTALEFRRAISVLKSLPFEVRSLKDTEGLPWISDEVKGIMEEIIEVGESREVQAVLNDEWYQSFHAFTRVFGVGVKTADKWYRMGLRTLEDVRSSKTLKFTTWSKVGLTYYEDLARGVTRAEADAIWLLVQDAVATFDPDAIVEIVGGQRRGKPQSHDVDLLISSPGAEKEQEDQLLQKVMNLWKKQGLLLCGKLAWSQWEWGGLPSGKADEGDGEASCFLILKLYDHLVRKSKRNMPTGSNMGESKPWKAIKVDLLRCPRGSFAFAMLQWTGSRMFRRDLRDYAREEKNMMLDNHSLYDMTRGIQLPAKSEEEIFEHLGLEYLEPFERNA

SEQ ID NO: 5103 - DNA, 1587 bp, synthetic construct
  misc_feature 1..1587: note = Variant of terminal deoxynucleotidyltransferase
  source 1..1587: mol_type = other DNA
atgcaccatcatcatcatcatggcggtagcggcagccacggcattcgtaccatcgattcggacttcgggaagaaacagcagaaaaaaggcgataaccacgatagttccgccacttatgaaatcaaatttcacgagtttgtgctgttcattctcgaagaaaaaatgggtgcgacgcgtcgtacttttctgacagatttagcccgcaagaaagggttccgcgtcgagaatgaactgaccgacgaagttacccacatcgtggcagaaaatctgtcacgctctgaagtattggcttggctgaaagaacacaagatggagaagaccaagcaattcgaactgctggatattagctggcttatcgaaagcatgaaagttggtaaaccggtggacaccaaggggaaataccagttggcggaatcggttgaggtgagtgcgaacccagatccgacagaaggtcgtgtaaacgagctgcctcctactatgaaaaccgtttctccgtatgcgtgtcaacgccgcaccaccctgaacaaccgtaatcaacgttttacggactcgctggagattcttcgcgagaattacgtgtttaaaggcaacgacgatactgcgctggaatttcgtcgtgctatctccgtgctgaaaagccttccgtttgaggtacgtagcctgaaagacacggaaggattgccctggatcagtgatgaagtcaaagggattatggaagaaatcatcgaagtcggggagtcgcgtgaagtgcaggccgtgctcaatgatgagtggtatcaaagcttccacgcatttacgcgtgtctttggagtggggcagaagacagcagacaagtggtaccgcatgggtctgcgcaccctggaggatgttcgttccagcaagaccctgaagttgaccacgtgggcgaaagtaggtctgacgtattatgaagatcttgctcgcggcgttacccgtgcggaagctgacgcgatttggctgctggttcaggatgcagtcgcaactttcgacccggatgcgatcgtggagattgtcggtggacagcgtcgtgggaaacctcagtctcacgacgttgatctgcttatcagttctccgggagctgaaaaagagcaagaagaccaactcctgcagaaagtgatgaatctgtggaagaaacaagggttgttgctgtgtggtcgtctggaatggagtcagtgggaatgggggggtctgccgtccggtaaggctgatgagggtgacggggaggcatcgtgctttctgatcctcaaactttatgatcatctggtgcgtaaaagtaaacgcaatatgccgactggttcgaacatgggcgagtccaaaccgtggaaagcaattaaagtagatctgctgcgttgcccccgcggcagttttgcgtttgcgatgttgcagtggaccggaagccgcatgttccgtcgtgatctgcgcgattacgcccgcgaagagaagaacatgatgctggacaatcatagcctgtatgacatgactcgtggtatccaactccctgctaaatcggaagaggaaattttcgaacatctggggcttgaatacctggaaccgttcgaacgtaacgca

SEQ ID NO: 5104 - protein, 529 aa, synthetic construct
  REGION 1..529: note = Variant of terminal deoxynucleotidyltransferase
MHHHHHHGGSGSHGIRTIDSDFGKKQQKKGDNHDSSATYEIKFHEFVLFILEEKMGATRRTFLTDLARKKGFRVENELTDEVTHIVAENLSRSEVLAWLKEHKMEKTKQFELLDISWLIESMKVGKPVDTKGKYQLAESVEVSANPDPTEGRVNELPPTMKTVSPYACQRRTTLNNRNQRFTDSLEILRENYVFKGNDDTALEFRRAISVLKSLPFEVRSLKDTEGLPWISDEVKGIMEEIIEVGESREVQAVLNDEWYQSFHAFTRVFGVGQKTADKWYRMGLRTLEDVRSSKTLKLTTWAKVGLTYYEDLARGVTRAEADAIWLLVQDAVATFDPDAIVEIVGGQRRGKPQSHDVDLLISSPGAEKEQEDQLLQKVMNLWKKQGLLLCGRLEWSQWEWGGLPSGKADEGDGEASCFLILKLYDHLVRKSKRNMPTGSNMGESKPWKAIKVDLLRCPRGSFAFAMLQWTGSRMFRRDLRDYAREEKNMMLDNHSLYDMTRGIQLPAKSEEEIFEHLGLEYLEPFERNA

SEQ ID NO: 5105 - DNA, 1587 bp, synthetic construct
  misc_feature 1..1587: note = Variant of terminal deoxynucleotidyltransferase
  source 1..1587: mol_type = other DNA
atgcaccatcatcatcatcatggcggtagcggcagccacggcattcgtaccatcgattcggacttcgggaagaaacagcagaaaaaaggcgataaccacgatagttccgccacttatgaaatcaaatttcacgagtttgtgctgttcattctcgaagaaaaaatgggtgcgacgcgtcgtacttttctgacagatttagcccgcaagaaagggttccgcgtcgagaatgaactgaccgacgaagttacccacatcgtggcagaaaatctgtcacgctctgaagtattggcttggctgaaagaacacaagatggagaagaccaagcaattcgaactgctggatattagctggcttatcgaaagcatgaaagttggtaaaccggtggacaccaaggggaaataccagttggcggaatcggttgaggtgagtgcgaacccagatccgacagaaggtcgtgtaaacgagctgcctcctactatgaaaaccgtttctccgtatgcgtgtcaacgccgcaccaccctgaacaaccgtaatcaacgttttacggactcgctggagattcttcgcgagaattacgtgtttaaaggcaacgacgatactgcgctggaatttcgtcgtgctatctccgtgctgaaaagccttccgtttgaggtacgtagcctgaaagacacggaaggattgccctggatcagtgatgaagtcaaagggattatggaagaaatcatcgaagtcggggagtcgcgtgaagtgcaggccgtgctcaatgatgagtggtatcaaagcttccacgcatttacgcgtgtctttggagtggggatgaagacagcagacaagtggtaccgcatgggtctgcgcaccctggaggatgttcgttccagcaagaccctgaagttgaccacgtgggcgaaagtaggtctgacgtattatgaagatcttgctcgcggcgttacccgtgcggaagctgacgcgatttggctgctggttcaggatgcagtcgcaactttcgacccggatgcgatcgtggagattgtcggtggatttcgtcgtgggaaacctcagggtcacgacgttgatctgcttatcagttctccgggagctgagaaagagcaagaagaccaactcctgcagaaagtgatgaatctgtggaagaaacaagggttgttgctgtgtggtcgtctggaatggagtcagtgggaatgggggggtctgccgtccggtaaggctgatgagggtgacggggaggcatcgtgctttctgatcctcaaactttatgatcatctggtgcgtaaaagtaaacgcaatatgccgactggttcgaacatgggcgagtccaaaccgtggaaagcaattaaagtagatctgctgcgttgcccccgcggcagttttgcgtttgcgatgttgcagtggaccggaagccgcatgttccgtcgtgatctgcgcgattacgcccgcgaagagaagaacatgatgctggacaatcatagcctgtatgacatgactcgtggtatccaactccctgctaaatcggaagaggaaattttcgaacatctggggcttgaatacctggaaccgttcgaacgtaacgca

SEQ ID NO: 5106 - protein, 529 aa, synthetic construct
  REGION 1..529: note = Variant of terminal deoxynucleotidyltransferase
MHHHHHHGGSGSHGIRTIDSDFGKKQQKKGDNHDSSATYEIKFHEFVLFILEEKMGATRRTFLTDLARKKGFRVENELTDEVTHIVAENLSRSEVLAWLKEHKMEKTKQFELLDISWLIESMKVGKPVDTKGKYQLAESVEVSANPDPTEGRVNELPPTMKTVSPYACQRRTTLNNRNQRFTDSLEILRENYVFKGNDDTALEFRRAISVLKSLPFEVRSLKDTEGLPWISDEVKGIMEEIIEVGESREVQAVLNDEWYQSFHAFTRVFGVGMKTADKWYRMGLRTLEDVRSSKTLKLTTWAKVGLTYYEDLARGVTRAEADAIWLLVQDAVATFDPDAIVEIVGGFRRGKPQGHDVDLLISSPGAEKEQEDQLLQKVMNLWKKQGLLLCGRLEWSQWEWGGLPSGKADEGDGEASCFLILKLYDHLVRKSKRNMPTGSNMGESKPWKAIKVDLLRCPRGSFAFAMLQWTGSRMFRRDLRDYAREEKNMMLDNHSLYDMTRGIQLPAKSEEEIFEHLGLEYLEPFERNA

SEQ ID NO: 5107 - DNA, 1587 bp, synthetic construct
  misc_feature 1..1587: note = Variant of terminal deoxynucleotidyltransferase
  source 1..1587: mol_type = other DNA
atgcaccatcatcatcatcatggcggtagcggcagccacggcattcgtaccatcgattcggacttcgggaagaaacagcagaaaaaaggcgataaccacgatagttccgccacttatgaaatcaaatttcacgagtttgtgctgttcattctcgaagaaaaaatgggtgcgacgcgtcgtacttttctgacagatttagcccgcaagaaagggttccgcgtcgagaatgaactgaccgacgaagttacccacatcgtggcagaaaatctgtcacgctctgaagtattggcttggctgaaagaacacaagatggagaagaccaagcaattcgaactgctggatattagctggcttatcgaaagcatgaaagttggtaaaccggtggacaccaaggggaaataccagttggcggaatcggttgaggtgagtgcgaacccagatccgacagaaggtcgtgtaaacgagctgcctcctactatgaaaaccgtttctccgtatgcgtgtcaacgccgcaccaccctgaacaaccgtaatcaacgttttacggactcgctggagattcttcgcgagaattacgtgtttaaaggcaacgacgatactgcgctggaatttcgtcgtgctatctccgtgctgaaaagccttccgtttgaggtacgtagcctgaaagacacggaaggattgccctggatcagtgatgaagtcaaagggattatggaagaaatcatcgaagtcggggagtcgcgtgaagtgcaggccgtgctcaatgatgagtggtatcaaagcttccacgcatttacgcgtgtctttggagtgggggtgaagacagcagacaagtggtaccagatgggtctgcgcaccctggaggatgttcgttccagcaagaccctgaagttgaccacgtgggcgaaagtaggtctgacgtattatgaagatcttgctcgcggcgttacccgtgcggaagctgacgcgatttggctgctggttcaggatgcagtcgcaactttcgacccggatgcgatcgtggagattgtcggtggacagcgtcgtgggaaacctcagtctcacgacgttgatctgcttatcagttctccgggagctgaaaaagagcaagaagaccaactcctgcagaaagtgatgaatctgtggaagaaacaagggttgttgctgtgtggtcgtctggaatggagtcagtgggaatgggggggtctgccgtccggtaaggctgatgagggtgacggggaggcatcgtgctttctgatcctcaaactttatgatcatctggtgcgtaaaagtaaacgcaatatgccgactggttcgaacatgggcgagtccaaaccgtggaaagcaattaaagtagatctgctgcgttgcccccgcggcagttttgcgtttgcgatgttgcagtggaccggaagccgcatgttccgtcgtgatctgcgcgattacgcccgcgaagagaagaacatgatgctggacaatcatagcctgtatgacatgactcgtggtatccaactccctgctaaatcggaagaggaaattttcgaacatctggggcttgaatacctggaaccgttcgaacgtaacgca

SEQ ID NO: 5108 - protein, 529 aa, synthetic construct
  REGION 1..529: note = Variant of terminal deoxynucleotidyltransferase
MHHHHHHGGSGSHGIRTIDSDFGKKQQKKGDNHDSSATYEIKFHEFVLFILEEKMGATRRTFLTDLARKKGFRVENELTDEVTHIVAENLSRSEVLAWLKEHKMEKTKQFELLDISWLIESMKVGKPVDTKGKYQLAESVEVSANPDPTEGRVNELPPTMKTVSPYACQRRTTLNNRNQRFTDSLEILRENYVFKGNDDTALEFRRAISVLKSLPFEVRSLKDTEGLPWISDEVKGIMEEIIEVGESREVQAVLNDEWYQSFHAFTRVFGVGVKTADKWYQMGLRTLEDVRSSKTLKLTTWAKVGLTYYEDLARGVTRAEADAIWLLVQDAVATFDPDAIVEIVGGQRRGKPQSHDVDLLISSPGAEKEQEDQLLQKVMNLWKKQGLLLCGRLEWSQWEWGGLPSGKADEGDGEASCFLILKLYDHLVRKSKRNMPTGSNMGESKPWKAIKVDLLRCPRGSFAFAMLQWTGSRMFRRDLRDYAREEKNMMLDNHSLYDMTRGIQLPAKSEEEIFEHLGLEYLEPFERNA

SEQ ID NO: 5109 - DNA, 1587 bp, synthetic construct
  misc_feature 1..1587: note = Variant of terminal deoxynucleotidyltransferase
  source 1..1587: mol_type = other DNA
atgcaccatcatcatcatcatggcggtagcggcagccacggcattcgtaccatcgattcggacttcgggaagaaacagcagaaaaaaggcgataaccacgatagttccgccacttatgaaatcaaatttcacgagtttgtgctgttcattctcgaagaaaaaatgggtgcgacgcgtcgtacttttctgacagatttagcccgcaagaaagggttccgcgtcgagaatgaactgaccgacgaagttacccacatcgtggcagaaaatctgtcacgctctgaagtattggcttggctgaaagaacacaagatggagaagaccaagcaattcgaactgctggatattagctggcttatcgaaagcatgaaagttggtaaaccggtggacaccaaggggaaataccagttggcggaatcggttgaggtgagtgcgaacccagatccgacagaaggtcgtgtaaacgagctgcctcctactatgaaaaccgtttctccgtatgcgtgtcaacgccgcaccaccctgaacaaccgtaatcaacgttttacggactcgctggagattcttcgcgagaattacgtgtttaaaggcaacgacgatactgcgctggaatttcgtcgtgctatctccgtgctgaaaagccttccgtttgaggtacgtagcctgaaagacacggaaggattgccctggatcagtgatgaagtcaaagggattatggaagaaatcatcgaagtcggggagtcgcgtgaagtgcaggccgtgctcaatgatgagtggtatcaaagcttccacgcatttacgcgtgtctttggagtgggggtgaagacagcagacaagtggtaccgcatgggtctgcgcaccctggaggatgttcgttccagcaagaccctgaagttgaccacgtgggcgaaagtaggtctgacgtattatgaagatcttgctcgcggcgttacccgtgcggaagctgacgcgatttggctgctggttcaggatgcagtcgcaactttcgacccggatgcgatcgtggagattgtcggtggacagcgtcgtgggaaacctcagtctcacgacgttgatctgcttctgagttctccgggagctgaaaaagagcaagaagaccaactcctgcagaaagtgatgaatctgtggaagaaacaagggttgttgctgtgtggtcgtctggaatggagtcagtgggaatgggggggtctgccgtccggtaaggctgatgagggtgacggggaggcatcgtgctttctgatcctcaaactttatgatcatctggtgcgtaaaagtaaacgcaatatgccgactggttcgaacatgggcgagtccaaaccgtggaaagcaattaaagtagatctgctgcgttgcccccgcggcagttttgcgtttgcgatgttgcagtggaccggaagccgcatgttccgtcgtgatctgcgcgattacgcccgcgaagagaagaacatgatgctggacaatcatagcctgtatgacatgactcgtggtatccaactccctgctaaatcggaagaggaaattttcgaacatctggggcttgaatacctggaaccgttcgaacgtaacgca

SEQ ID NO: 5110 - protein, 529 aa, synthetic construct
  REGION 1..529: note = Variant of terminal deoxynucleotidyltransferase
MHHHHHHGGSGSHGIRTIDSDFGKKQQKKGDNHDSSATYEIKFHEFVLFILEEKMGATRRTFLTDLARKKGFRVENELTDEVTHIVAENLSRSEVLAWLKEHKMEKTKQFELLDISWLIESMKVGKPVDTKGKYQLAESVEVSANPDPTEGRVNELPPTMKTVSPYACQRRTTLNNRNQRFTDSLEILRENYVFKGNDDTALEFRRAISVLKSLPFEVRSLKDTEGLPWISDEVKGIMEEIIEVGESREVQAVLNDEWYQSFHAFTRVFGVGVKTADKWYRMGLRTLEDVRSSKTLKLTTWAKVGLTYYEDLARGVTRAEADAIWLLVQDAVATFDPDAIVEIVGGQRRGKPQSHDVDLLLSSPGAEKEQEDQLLQKVMNLWKKQGLLLCGRLEWSQWEWGGLPSGKADEGDGEASCFLILKLYDHLVRKSKRNMPTGSNMGESKPWKAIKVDLLRCPRGSFAFAMLQWTGSRMFRRDLRDYAREEKNMMLDNHSLYDMTRGIQLPAKSEEEIFEHLGLEYLEPFERNA

SEQ ID NO: 5111 - DNA, 1587 bp, synthetic construct
  misc_feature 1..1587: note = Variant of terminal deoxynucleotidyltransferase
  source 1..1587: mol_type = other DNA
atgcaccatcatcatcatcatggcggtagcggcagccacggcattcgtaccatcgattcggacttcgggaagaaacagcagaaaaaaggcgataaccacgatagttccgccacttatgaaatcaaatttcacgagtttgtgctgttcattctcgaagaaaaaatgggtgcgacgcgtcgtacttttctgacagatttagcccgcaagaaagggttccgcgtcgagaatgaactgaccgacgaagttacccacatcgtggcagaaaatctgtcacgctctgaagtattggcttggctgaaagaacacaagatggagaagaccaagcaattcgaactgctggatattagctggcttatcgaaagcatgaaagttggtaaaccggtggacaccaaggggaaataccagttggcggaatcggttgaggtgagtgcgaacccagatccgacagaaggtcgtgtaaacgagctgcctcctactatgaaaaccgtttctccgtatgcgtgtcaacgccgcaccaccctgaacaaccgtaatcaacgttttacggactcgctggagattcttcgcgagaattacgtgtttaaaggcaacgacgatactgcgctggaatttcgtcgtgctatctccgtgctgaaaagccttccgtttgaggtacgtagcctgaaagacacggaaggattgccctggatcagtgatgaagtcaaagggattatggaagaaatcatcgaagtcggggagtcgcgtgaagtgcaggccgtgctcaatgatgagtggtatcaaagcttccacgcatttacgcgtgtctttggagtgggggtgaagacagcagacaagtggtaccgcatgggtctgcgcaccctggaggatgttcgttccagcaagaccctgaagttgaccacgtgggcgaaagtaggtctgacgtattatgaagatcttgctcgcggcgttacccgtgcggaagctgacgcgacttggctgctggttcaggatgcagtcgcaactttcgacccggatgcgatcgtggagattgtcggtggacagcgtcgtgggaaacctcagtctcacgacgttgatctgcttatcagttctccgggagctgaaaaagagcaagaagaccaactcctgcagaaagtgatgaatctgtggaagaaacaagggttgttgctgtgtggtcgtctggaatggagtcagtgggaatgggggggtctgccgtccggtaaggctgatgagggtgacggggaggcatcgtgctttctgatcctcaaactttatgatcatctggtgcgtaaaagtaaacgcaatatgccgactggttcgaacatgggcgagtccaaaccgtggaaagcaattaaagtagatctgctgcgttgcccccgcggcagttttgcgtttgcgatgttgcagtggaccggaagccgcatgttccgtcgtgatctgcgcgattacgcccgcgaagagaagaacatgatgctggacaatcatagcctgtatgacatgactcgtggtatccaactccctgctaaatcggaagaggaaattttcgaacatctggggcttgaatacctggaaccgttcgaacgtaacgca

SEQ ID NO: 5112 - protein, 529 aa, synthetic construct
  REGION 1..529: note = Variant of terminal deoxynucleotidyltransferase
MHHHHHHGGSGSHGIRTIDSDFGKKQQKKGDNHDSSATYEIKFHEFVLFILEEKMGATRRTFLTDLARKKGFRVENELTDEVTHIVAENLSRSEVLAWLKEHKMEKTKQFELLDISWLIESMKVGKPVDTKGKYQLAESVEVSANPDPTEGRVNELPPTMKTVSPYACQRRTTLNNRNQRFTDSLEILRENYVFKGNDDTALEFRRAISVLKSLPFEVRSLKDTEGLPWISDEVKGIMEEIIEVGESREVQAVLNDEWYQSFHAFTRVFGVGVKTADKWYRMGLRTLEDVRSSKTLKLTTWAKVGLTYYEDLARGVTRAEADATWLLVQDAVATFDPDAIVEIVGGQRRGKPQSHDVDLLISSPGAEKEQEDQLLQKVMNLWKKQGLLLCGRLEWSQWEWGGLPSGKADEGDGEASCFLILKLYDHLVRKSKRNMPTGSNMGESKPWKAIKVDLLRCPRGSFAFAMLQWTGSRMFRRDLRDYAREEKNMMLDNHSLYDMTRGIQLPAKSEEEIFEHLGLEYLEPFERNA

SEQ ID NO: 5113 - DNA, 1587 bp, synthetic construct
  misc_feature 1..1587: note = Variant of terminal deoxynucleotidyltransferase
  source 1..1587: mol_type = other DNA
atgcaccatcatcatcatcatggcggtagcggcagccacggcattcgtaccatcgattcggacttcgggaagaaacagcagaaaaaaggcgataaccacgatagttccgccacttatgaaatcaaatttcacgagtttgtgctgttcattctcgaagaaaaaatgggtgcgacgcgtcgtacttttctgacagatttagcccgcaagaaagggttccgcgtcgagaatgaactgaccgacgaagttacccacatcgtggcagaaaatctgtcacgctctgaagtattggcttggctgaaagaacacaagatggagaagaccaagcaattcgaactgctggatattagctggcttatcgaaagcatgaaagttggtaaaccggtggacaccaaggggaaataccagttggcggaatcggttgaggtgagtgcgaacccagatccgacagaaggtcgtgtaaacgagctgcctcctactatgaaaaccgtttctccgtatgcgtgtcaacgccgcaccaccctgaacaaccgtaatcaacgttttacggactcgctggagattcttcgcgagaattacgtgtttaaaggcaacgacgatactgcgctggaatttcgtcgtgctatctccgtgctgaaaagccttccgtttgaggtacgtagcctgaaagacacggaaggattgccctggatcagtgatgaagtcaaagggattatggaagaaatcatcgaagtcggggagtcgcgtgaagtgcaggccgtgctcaatgatgagtggtatcaaagcttccacgcatttacgcgtgtctttggagtgggggtgaagacagcagacaagtggtaccgcatgggtctgcgcaccctggaggatgttcgttccagcaagaccctgaagttgaccacgtgggcgaaagtaggtctgacgtattatgaagatcttgctcgcggcgttacccgtgcggaagctgacgcgatttggctgctggttcaggatgcagtcgcaactttcgacccggatgcgatcgtggagattgtcggtggacagcgtcgtgggaaacctcagtctcacgacgttgatctggttatcagttctccgggagctgaaaaagagcaagaagaccaactcctgcagaaagtgatgaatctgtggaagaaacaagggttgttgctgtgtggtcgtctggaatggagtcagtgggaatgggggggtctgccgtccggtaaggctgatgagggtgacggggaggcatcgtgctttctgatcctcaaactttatgatcatctggtgcgtaaaagtaaacgcaatatgccgactggttcgaacatgggcgagtccaaaccgtggaaagcaattaaagtagatctgctgcgttgcccccgcggcagttttgcgtttgcgatgttgcagtggaccggaagccgcatgttccgtcgtgatctgcgcgattacgcccgcgaagagaagaacatgatgctggacaatcatagcctgtatgacatgactcgtggtatccaactccctgctaaatcggaagaggaaattttcgaacatctggggcttgaatacctggaaccgttcgaacgtaacgca

SEQ ID NO: 5114 - protein, 529 aa, synthetic construct
  REGION 1..529: note = Variant of terminal deoxynucleotidyltransferase
MHHHHHHGGSGSHGIRTIDSDFGKKQQKKGDNHDSSATYEIKFHEFVLFILEEKMGATRRTFLTDLARKKGFRVENELTDEVTHIVAENLSRSEVLAWLKEHKMEKTKQFELLDISWLIESMKVGKPVDTKGKYQLAESVEVSANPDPTEGRVNELPPTMKTVSPYACQRRTTLNNRNQRFTDSLEILRENYVFKGNDDTALEFRRAISVLKSLPFEVRSLKDTEGLPWISDEVKGIMEEIIEVGESREVQAVLNDEWYQSFHAFTRVFGVGVKTADKWYRMGLRTLEDVRSSKTLKLTTWAKVGLTYYEDLARGVTRAEADAIWLLVQDAVATFDPDAIVEIVGGQRRGKPQSHDVDLVISSPGAEKEQEDQLLQKVMNLWKKQGLLLCGRLEWSQWEWGGLPSGKADEGDGEASCFLILKLYDHLVRKSKRNMPTGSNMGESKPWKAIKVDLLRCPRGSFAFAMLQWTGSRMFRRDLRDYAREEKNMMLDNHSLYDMTRGIQLPAKSEEEIFEHLGLEYLEPFERNA

SEQ ID NO: 5115 - DNA, 1587 bp, synthetic construct
  misc_feature 1..1587: note = Variant of terminal deoxynucleotidyltransferase
  source 1..1587: mol_type = other DNA
atgcaccatcatcatcatcatggcggtagcggcagccacggcattcgtaccatcgattcggacttcgggaagaaacagcagaaaaaaggcgataaccacgatagttccgccacttatgaaatcaaatttcacgagtttgtgctgttcattctcgaagaaaaaatgggtgcgacgcgtcgtacttttctgacagatttagcccgcaagaaagggttccgcgtcgagaatgaactgaccgacgaagttacccacatcgtggcagaaaatctgtcacgctctgaagtattggcttggctgaaagaacacaagatggagaagaccaagcaattcgaactgctggatattagctggcttatcgaaagcatgaaagttggtaaaccggtggacaccaaggggaaataccagttggcggaatcggttgaggtgagtgcgaacccagatccgacagaaggtcgtgtaaacgagctgcctcctactatgaaaaccgtttctccgtatgcgtgtcaacgccgcaccaccctgaacaaccgtaatcaacgttttacggactcgctggagattcttcgcgagaattacgtgtttaaaggcaacgacgatactgcgctggaatttcgtcgtgctatctccgtgctgaaaagccttccgtttgaggtacgtagcctgaaagacacggaaggattgccctggatcagtgatgaagtcaaagggattatggaagaaatcatcgaagtcggggagtcgcgtgaagtgcaggccgtgctcaatgatgagtggtatcaaagcttccacgcatttacgcgtgtctttggagtgggggtgaagacagcagacaagtggtaccgcatgggtctgcgcaccctggaggatgttcgttccagcaagaccctgaagttgaccacgtgggcgaaagtaggtctgacgtattatgaagatcttgctcgcggcgttacccgtgcggaagctgacgcgatttggctgctggttcaggatgcagtcgcaactttcgacccggatgcgatcgtggagattgtcggtggacagcgtcgtgggaaacctcagtctcacgacgttgatctgcttatcagttctccgggagctgaaaaagagcaagaagaccaactcctgcagaaagtgatgaatctgtggaagaaacaagggttgttgctgtgtggtcgtctggaatggagtcagtgggaatgggggggtctgccgtccggtaaggctgatgagggtgacggggaggcatcgtgctttctgatcctcaaactttatgatcatctggtgcgtaaaagtaaacgcaatatgccgactggttcgaacatgggcgagtccaaaccgtggaaagcaattaaagtagatctgctgcgttgcccccgcggcagttttgcgtttgcgatgttgcagtggaccggaagctctatgttccgtcgtgatctgcgcgattacgcccgcgaagagaagaacatgatgctggacaatcatagcctgtatgacatgactcgtggtatccaactccctgctaaatcggaagaggaaattttcgaacatctggggcttgaatacctggaaccgttcgaacgtaacgca

SEQ ID NO: 5116 - protein, 529 aa, synthetic construct
  REGION 1..529: note = Variant of terminal deoxynucleotidyltransferase
MHHHHHHGGSGSHGIRTIDSDFGKKQQKKGDNHDSSATYEIKFHEFVLFILEEKMGATRRTFLTDLARKKGFRVENELTDEVTHIVAENLSRSEVLAWLKEHKMEKTKQFELLDISWLIESMKVGKPVDTKGKYQLAESVEVSANPDPTEGRVNELPPTMKTVSPYACQRRTTLNNRNQRFTDSLEILRENYVFKGNDDTALEFRRAISVLKSLPFEVRSLKDTEGLPWISDEVKGIMEEIIEVGESREVQAVLNDEWYQSFHAFTRVFGVGVKTADKWYRMGLRTLEDVRSSKTLKLTTWAKVGLTYYEDLARGVTRAEADAIWLLVQDAVATFDPDAIVEIVGGQRRGKPQSHDVDLLISSPGAEKEQEDQLLQKVMNLWKKQGLLLCGRLEWSQWEWGGLPSGKADEGDGEASCFLILKLYDHLVRKSKRNMPTGSNMGESKPWKAIKVDLLRCPRGSFAFAMLQWTGSSMFRRDLRDYAREEKNMMLDNHSLYDMTRGIQLPAKSEEEIFEHLGLEYLEPFERNA

SEQ ID NO: 5117 - DNA, 1587 bp, synthetic construct
  misc_feature 1..1587: note = Variant of terminal deoxynucleotidyltransferase
  source 1..1587: mol_type = other DNA
atgcaccatcatcatcatcatggcggtagcggcagccacggcattcgtaccatcgattcggacttcgggaagaaacagcagaaaaaaggcgataaccacgatagttccgccacttatgaaatcaaatttcacgagtttgtgctgttcattctcgaagaaaaaatgggtgcgacgcgtcgtacttttctgacagatttagcccgcaagaaagggttccgcgtcgagaatgaactgaccgacgaagttacccacatcgtggcagaaaatctgtcacgctctgaagtattggcttggctgaaagaacacaagatggagaagaccaagcaattcgaactgctggatattagctggcttatcgaaagcatgaaagttggtaaaccggtggacaccaaggggaaataccagttggcggaatcggttgaggtgagtgcgaacccagatccgacagaaggtcgtgtaaacgagctgcctcctactatgaaaaccgtttctccgtatgcgtgtcaacgccgcaccaccctgaacaaccgtaatcaacgttttacggactcgctggagattcttcgcgagaattacgtgtttaaaggcaacgacgatactgcgctggaatttcgtcgtgctatctccgtgctgaaaagccttccgtttgaggtacgtagcctgaaagacacggaaggattgccctggatcagtgatgaagtcaaagggattatggaagaaatcatcgaagtcggggagtcgcgtgaagtgcaggccgtgctcaatgatgagtggtatcaaagcttccacgcatttacgcgtgtctttggagtgggggtgaagacagcagacaagtggtaccgcatgggtctgcgcaccctggaggatgttcgttccagcaagaccctgaagttgaccacgtgggcgaaagtaggtctgacgtattatgaagatcttgctcgcggcgttacccgtgcggaagctgacgcgatttggctgctggttcaggatgcagtcgcaactttcgacccggatgcgatcgtggagattgtcggtggacagcgtcgtgggaaacctcagtctcacgacgttgatgtgcttatcagttctccgggagctgaaaaagagcaagaagaccaactcctgcagaaagtgatgaatctgtggaagaaacaagggttgttgctgtgtggtcgtctggaatggagtcagtgggaatgggggggtctgccgtccggtaaggctgatgagggtgacggggaggcatcgtgctttctgatcctcaaactttatgatcatctggtgcgtaaaagtaaacgcaatatgccgactggttcgaacatgggcgagtccaaaccgtggaaagcaattaaagtagatctgctgcgttgcccccgcggcagttttgcgtttgcgatgttgcagtggaccggaagccgcatgttccgtcgtgatctgcgcgattacgcccgcgaagagaagaacatgatgctggacaatcatagcctgtatgacatgactcgtggtatccaactccctgctaaatcggaagaggaaattttcgaacatctggggcttgaatacctggaaccgttcgaacgtaacgca

SEQ ID NO: 5118 - protein, 529 aa, synthetic construct
  REGION 1..529: note = Variant of terminal deoxynucleotidyltransferase
MHHHHHHGGSGSHGIRTIDSDFGKKQQKKGDNHDSSATYEIKFHEFVLFILEEKMGATRRTFLTDLARKKGFRVENELTDEVTHIVAENLSRSEVLAWLKEHKMEKTKQFELLDISWLIESMKVGKPVDTKGKYQLAESVEVSANPDPTEGRVNELPPTMKTVSPYACQRRTTLNNRNQRFTDSLEILRENYVFKGNDDTALEFRRAISVLKSLPFEVRSLKDTEGLPWISDEVKGIMEEIIEVGESREVQAVLNDEWYQSFHAFTRVFGVGVKTADKWYRMGLRTLEDVRSSKTLKLTTWAKVGLTYYEDLARGVTRAEADAIWLLVQDAVATFDPDAIVEIVGGQRRGKPQSHDVDVLISSPGAEKEQEDQLLQKVMNLWKKQGLLLCGRLEWSQWEWGGLPSGKADEGDGEASCFLILKLYDHLVRKSKRNMPTGSNMGESKPWKAIKVDLLRCPRGSFAFAMLQWTGSRMFRRDLRDYAREEKNMMLDNHSLYDMTRGIQLPAKSEEEIFEHLGLEYLEPFERNA

SEQ ID NO: 5119 - DNA, 1587 bp, synthetic construct
  misc_feature 1..1587: note = Variant of terminal deoxynucleotidyltransferase
  source 1..1587: mol_type = other DNA
atgcaccatcatcatcatcatggcggtagcggcagccacggcattcgtaccatcgattcggacttcgggaagaaacagcagaaaaaaggcgataaccacgatagttccgccacttatgaaatcaaatttcacgagtttgtgctgttcattctcgaagaaaaaatgggtgcgacgcgtcgtacttttctgacagatttagcccgcaagaaagggttccgcgtcgagaatgaactgaccgacgaagttacccacatcgtggcagaaaatctgtcacgctctgaagtattggcttggctgaaagaacacaagatggagaagaccaagcaattcgaactgctggatattagctggcttatcgaaagcatgaaagttggtaaaccggtggacaccaaggggaaataccagttggcggaatcggttgaggtgagtgcgaacccagatccgacagaaggtcgtgtaaacgagctgcctcctactatgaaaaccgtttctccgtatgcgtgtcaacgccgcaccaccctgaacaaccgtaatcaacgttttacggactcgctggagattcttcgcgagaattacgtgtttaaaggcaacgacgatactgcgctggaatttcgtcgtgctatctccgtgctgaaaagccttccgtttgaggtacgtagcctgaaagacacggaaggattgccctggatcagtgatgaagtcaaagggattatggaagaaatcatcgaagtcggggagtcgcgtgaagtgcaggccgtgctcaatgatgagtggtatcaaagcttccacgcatttacgcgtgtctttggagtgggggtgaagacagcagacaagtggtaccgcatgggtctgcgcaccctggaggatgttcgttccagcaagaccctgaagttgaccacgtgggcgaaagtaggtctgacgtattatgaagatcttgctcgcggcgttacccgtgcggaagctgacgcgatttggctgctggttcaggatgcagtcgcaactttcgacccggatgcgatcgtggagattgtcggtggacagcgtcgtgggaaacctcagtctcacgacgttgatctgcttatcagttctccgggagctgaaaaagagcaagaagaccaactcctgcagaaagtgatgaatctgtggaagaaacaagggttgttgctgtgtggtcgtctggaatggagtcagtgggaatgggggggtctgccgtccggtaaggctgatgagggtgacggggaggcatcgtgctttctgatcctcaaactttatgatcatctggtgcgtaaaagtaaacgcaatatgccgactggttcgaacatgggcgagtccaaaccgtggaaagcaattaaagtagatctgctgcgttgcccccgcggcagttttgtgtttgcgatgttgcagtggaccggaagccgcatgttccgtcgtgatctgcgcgattacgcccgcgaagagaagaacatgatgctggacaatcatagcctgtatgacatgactcgtggtatccaactccctgctaaatcggaagaggaaattttcgaacatctggggcttgaatacctggaaccgttcgaacgtaacgca

SEQ ID NO: 5120 - protein, 529 aa, synthetic construct
  REGION 1..529: note = Variant of terminal deoxynucleotidyltransferase
MHHHHHHGGSGSHGIRTIDSDFGKKQQKKGDNHDSSATYEIKFHEFVLFILEEKMGATRRTFLTDLARKKGFRVENELTDEVTHIVAENLSRSEVLAWLKEHKMEKTKQFELLDISWLIESMKVGKPVDTKGKYQLAESVEVSANPDPTEGRVNELPPTMKTVSPYACQRRTTLNNRNQRFTDSLEILRENYVFKGNDDTALEFRRAISVLKSLPFEVRSLKDTEGLPWISDEVKGIMEEIIEVGESREVQAVLNDEWYQSFHAFTRVFGVGVKTADKWYRMGLRTLEDVRSSKTLKLTTWAKVGLTYYEDLARGVTRAEADAIWLLVQDAVATFDPDAIVEIVGGQRRGKPQSHDVDLLISSPGAEKEQEDQLLQKVMNLWKKQGLLLCGRLEWSQWEWGGLPSGKADEGDGEASCFLILKLYDHLVRKSKRNMPTGSNMGESKPWKAIKVDLLRCPRGSFVFAMLQWTGSRMFRRDLRDYAREEKNMMLDNHSLYDMTRGIQLPAKSEEEIFEHLGLEYLEPFERNA

SEQ ID NO: 5121 - DNA, 1587 bp, synthetic construct
  misc_feature 1..1587: note = Variant of terminal deoxynucleotidyltransferase
  source 1..1587: mol_type = other DNA
atgcaccatcatcatcatcatggcggtagcggcagccacggcattcgtaccatcgattcggacttcgggaagaaacagcagaaaaaaggcgataaccacgatagttccgccacttatgaaatcaaatttcacgagtttgtgctgttcattctcgaagaaaaaatgggtgcgacgcgtcgtacttttctgacagatttagcccgcaagaaagggttccgcgtcgagaatgaactgaccgacgaagttacccacatcgtggcagaaaatctgtcacgctctgaagtattggcttggctgaaagaacacaagatggagaagaccaagcaattcgaactgctggatattagctggcttatcgaaagcatgaaagttggtaaaccggtggacaccaaggggaaataccagttggcggaatcggttgaggtgagtgcgaacccagatccgacagaaggtcgtgtaaacgagctgcctcctactatgaaaaccgtttctccgtatgcgtgtcaacgccgcaccaccctgaacaaccgtaatcaacgttttacggactcgctggagattcttcgcgagaattacgtgtttaaaggcaacgacgatactgcgactgaatttcgtcgtgctatctccgtgctgaaaagccttccgtttgaggtacgtagcctgaaagacacggaaggattgccctggatcagtgatgaagtcaaagggattatggaagaaatcatcgaagtcggggagtcgcgtgaagtgcaggccgtgctcaatgatgagtggtatcaaagcttccacgcatttacgcgtgtctttggagtgggggtgaagacagcagacaagtggtaccgcatgggtctgcgcaccctggaggatgttcgttccagcaagaccctgaagttgaccacgtgggcgaaagtaggtctgacgtattatgaagatcttgctcgcggcgttacccgtgcggaagctgacgcgatttggctgctggttcaggatgcagtcgcaactttcgacccggatgcgatcgtggagattgtcggtggacagcgtcgtgggaaacctcagtctcacgacgttgatctgcttatcagttctccgggagctgaaaaagagcaagaagaccaactcctgcagaaagtgatgaatctgtggaagaaacaagggttgttgctgtgtggtcgtctggaatggagtcagtgggaatgggggggtctgccgtccggtaaggctgatgagggtgacggggaggcatcgtgctttctgatcctcaaactttatgatcatctggtgcgtaaaagtaaacgcaatatgccgactggttcgaacatgggcgagtccaaaccgtggaaagcaattaaagtagatctgctgcgttgcccccgcggcagttttgcgtttgcgatgttgcagtggaccggaagccgcatgttccgtcgtgatctgcgcgattacgcccgcgaagagaagaacatgatgctggacaatcatagcctgtatgacatgactcgtggtatccaactccctgctaaatcggaagaggaaattttcgaacatctggggcttgaatacctggaaccgttcgaacgtaacgca

SEQ ID NO: 5122 - protein, 529 aa, synthetic construct
  REGION 1..529: note = Variant of terminal deoxynucleotidyltransferase
MHHHHHHGGSGSHGIRTIDSDFGKKQQKKGDNHDSSATYEIKFHEFVLFILEEKMGATRRTFLTDLARKKGFRVENELTDEVTHIVAENLSRSEVLAWLKEHKMEKTKQFELLDISWLIESMKVGKPVDTKGKYQLAESVEVSANPDPTEGRVNELPPTMKTVSPYACQRRTTLNNRNQRFTDSLEILRENYVFKGNDDTATEFRRAISVLKSLPFEVRSLKDTEGLPWISDEVKGIMEEIIEVGESREVQAVLNDEWYQSFHAFTRVFGVGVKTADKWYRMGLRTLEDVRSSKTLKLTTWAKVGLTYYEDLARGVTRAEADAIWLLVQDAVATFDPDAIVEIVGGQRRGKPQSHDVDLLISSPGAEKEQEDQLLQKVMNLWKKQGLLLCGRLEWSQWEWGGLPSGKADEGDGEASCFLILKLYDHLVRKSKRNMPTGSNMGESKPWKAIKVDLLRCPRGSFAFAMLQWTGSRMFRRDLRDYAREEKNMMLDNHSLYDMTRGIQLPAKSEEEIFEHLGLEYLEPFERNA

SEQ ID NO: 5123 - DNA, 1587 bp, synthetic construct
  misc_feature 1..1587: note = Variant of terminal deoxynucleotidyltransferase
  source 1..1587: mol_type = other DNA
atgcaccatcatcatcatcatggcggtagcggcagccacggcattcgtaccatcgattcggacttcgggaagaaacagcagaaaaaaggcgataaccacgatagttccgccacttatgaaatcaaatttcacgagtttgtgctgttcattctcgaagaaaaaatgggtgcgacgcgtcgtacttttctgacagatttagcccgcaagaaagggttccgcgtcgagaatgaactgaccgacgaagttacccacatcgtggcagaaaatctgtcacgctctgaagtattggcttggctgaaagaacacaagatggagaagaccaagcaattcgaactgctggatattagctggcttatcgaaagcatgaaagttggtaaaccggtggacaccaaggggaaataccagttggcggaatcggttgaggtgagtgcgaacccagatccgacagaaggtcgtgtaaacgagctgcctcctactatgaaaaccgtttctccgtatgcgtgtcaacgccgcaccaccctgaacaaccgtaatcaacgttttacggactcgctggagattcttcgcgagaattacgtgtttaaaggcaacgacgatactgcgctggaatttcgtcgtgctatctccgtgctgaaaagccttccgtttgaggtacgtagcctgaaagacacggaaggattgccctggatcagtgatgaagtcaaagggattatggaagaaatcatcgaagtcggggagtcgcgtgaagtgcaggccgtgctcaatgatgagtggtatcaaagcttccacgcatttacgcgtgtctttggagtgggggtgaagacagcagacaagtggtaccgcatgggtctgcgcaccctggaggatgttcgttccagcaagaccctgaagttgaccacgtgggcgaaagtaggtctgacgtattatgaagatcttgctcgcggcgttacccgtgcggaagctgacgcgatttggctgctggttcaggatgcagtcgcaactttcgacccggatgcgatcgtggagattgtcggtggacagcgtcgtgggaaacctcagtctcacgacgttgatctgcttatcagttctccgggagctgaaaaagagcaagaagaccaactcctgcagaaagtgatgaatctgtggaagaaacaagggttgttgctgtgtggtcgtctggaatggagtcagtgggaatgggggggtctgccgtccggtaagggtgatgagggtgacgcggaggcatcgtgctttctgatcctcaaactttatgatcatctggtgcgtaaaagtaaacgcaatatgccgactggttcgaacatgggcgagtccaaaccgtggaaagcaattaaagtagatctgctgcgttgcccccgcggcagttttgcgtttgcgatgttgcagtggaccggaagccgcatgttccgtcgtgatctgcgcgattacgcccgcgaagagaagaacatgatgctggacaatcatagcctgtatgacatgactcgtggtatccaactccctgctaaatcggaagaggaaattttcgaacatctggggcttgaatacctggaaccgttcgaacgtaacgca

SEQ ID NO: 5124 - protein, 529 aa, synthetic construct
  REGION 1..529: note = Variant of terminal deoxynucleotidyltransferase
MHHHHHHGGSGSHGIRTIDSDFGKKQQKKGDNHDSSATYEIKFHEFVLFILEEKMGATRRTFLTDLARKKGFRVENELTDEVTHIVAENLSRSEVLAWLKEHKMEKTKQFELLDISWLIESMKVGKPVDTKGKYQLAESVEVSANPDPTEGRVNELPPTMKTVSPYACQRRTTLNNRNQRFTDSLEILRENYVFKGNDDTALEFRRAISVLKSLPFEVRSLKDTEGLPWISDEVKGIMEEIIEVGESREVQAVLNDEWYQSFHAFTRVFGVGVKTADKWYRMGLRTLEDVRSSKTLKLTTWAKVGLTYYEDLARGVTRAEADAIWLLVQDAVATFDPDAIVEIVGGQRRGKPQSHDVDLLISSPGAEKEQEDQLLQKVMNLWKKQGLLLCGRLEWSQWEWGGLPSGKGDEGDAEASCFLILKLYDHLVRKSKRNMPTGSNMGESKPWKAIKVDLLRCPRGSFAFAMLQWTGSRMFRRDLRDYAREEKNMMLDNHSLYDMTRGIQLPAKSEEEIFEHLGLEYLEPFERNA

SEQ ID NO: 5125 - DNA, 1587 bp, synthetic construct
  misc_feature 1..1587: note = Variant of terminal deoxynucleotidyltransferase
  source 1..1587: mol_type = other DNA
atgcaccatcatcatcatcatggcggtagcggcagccacggcattcgtaccatcgattcggacttcgggaagaaacagcagaaaaaaggcgataaccacgatagttccgccacttatgaaatcaaatttcacgagtttgtgctgttcattctcgaagaaaaaatgggtgcgacgcgtcgtacttttctgacagatttagcccgcaagaaagggttccgcgtcgagaatgaactgaccgacgaagttacccacatcgtggcagaaaatctgtcacgctctgaagtattggcttggctgaaagaacacaagatggagaagaccaagcaattcgaactgctggatattagctggcttatcgaaagcatgaaagttggtaaaccggtggacaccaaggggaaataccagttggcggaatcggttgaggtgagtgcgaacccagatccgacagaaggtcgtgtaaacgagctgcctcctactatgaaaaccgtttctccgtatgcgtgtcaacgccgcaccaccctgaacaaccgtaatcaacgttttacggactcgctggagattcttcgcgagaattacgtgtttaaaggcaacgacgatactgcgctggaatttcgtcgtgctatctccgtgctgaaaagccttccgtttgaggtacgtagcctgaaagacacggaaggattgccctggatcagtgatgaagtcaaagggattatggaagaaatcatcgaagtcggggagtcgcgtgaagtgcaggccgtgctcaatgatgagtggtatcaaagcttccacgcatttacgcgtgtctttggagtgggggtgaagacagcagacaagtggtaccgcatgggtctgcgcaccctggaggatgttcgttccagcaagaccctgaagttgaccacgtgggcgaaagtaggtctgacgtattatgaagatcttgctcgcggcgttacccgtgcggaagctgacgcgatttggctgctggttcaggatgcagtcgcaactttcgacccggatgcgatcgtggagattgtcggtggacagcgtcgtgggaaacctcagtctcacgacgttgatctgcttatcagttctccgggagctgaaaaagagcaagaagaccaactcctgcagaaagtgatgaatctgtggaagaaacaagggttgttgctgtgtggtcgtctggaatggagtcagtgggaatgggggggtctgccgtccggtaaggctgatgagggtgacggggaggcatcgtgctttctgatcctcaaactttatgatcatctggtgcgtaaaagtaaacgtaatatgccgactggttcgaacatgggcgagtccaaaccgtggaaagcaattaaagtagatctgctgcgttgcccccgcggcagttttgcgtttgcgatgttgcagtggaccggaagccgcatgttccgtctggatctgcgcgattacgcccgcgaagagaagaacatgatgctggacaatcatagcctgtatgacatgactcgtggtatccaactccctgctaaatcggaagaggaaattttcgaacatctggggcttgaatacctggaaccgttcgaacgtaacgca

SEQ ID NO: 5126 - protein, 529 aa, synthetic construct
  REGION 1..529: note = Variant of terminal deoxynucleotidyltransferase
MHHHHHHGGSGSHGIRTIDSDFGKKQQKKGDNHDSSATYEIKFHEFVLFILEEKMGATRRTFLTDLARKKGFRVENELTDEVTHIVAENLSRSEVLAWLKEHKMEKTKQFELLDISWLIESMKVGKPVDTKGKYQLAESVEVSANPDPTEGRVNELPPTMKTVSPYACQRRTTLNNRNQRFTDSLEILRENYVFKGNDDTALEFRRAISVLKSLPFEVRSLKDTEGLPWISDEVKGIMEEIIEVGESREVQAVLNDEWYQSFHAFTRVFGVGVKTADKWYRMGLRTLEDVRSSKTLKLTTWAKVGLTYYEDLARGVTRAEADAIWLLVQDAVATFDPDAIVEIVGGQRRGKPQSHDVDLLISSPGAEKEQEDQLLQKVMNLWKKQGLLLCGRLEWSQWEWGGLPSGKADEGDGEASCFLILKLYDHLVRKSKRNMPTGSNMGESKPWKAIKVDLLRCPRGSFAFAMLQWTGSRMFRLDLRDYAREEKNMMLDNHSLYDMTRGIQLPAKSEEEIFEHLGLEYLEPFERNA

SEQ ID NO: 5127 - DNA, 1587 bp, synthetic construct
  misc_feature 1..1587: note = Variant of terminal deoxynucleotidyltransferase
  source 1..1587: mol_type = other DNA
atgcaccatcatcatcatcatggcggtagcggcagccacggcattcgtaccatcgattcggacttcgggaagaaacagcagaaaaaaggcgataaccacgatagttccgccacttatgaaatcaaatttcacgagtttgtgctgttcattctcgaagaaaaaatgggtgcgacgcgtcgtacttttctgacagatttagcccgcaagaaagggttccgcgtcgagaatgaactgaccgacgaagttacccacatcgtggcagaaaatctgtcacgctctgaagtattggcttggctgaaagaacacaagatggagaagaccaagcaattcgaactgctggatattagctggcttatcgaaagcatgaaagttggtaaaccggtggacaccaaggggaaataccagttggcggaatcggttgaggtgagtgcgaacccagatccgacagaaggtcgtgtaaacgagctgcctcctactatgaaaaccgtttctccgtatgcgtgtcaacgccgcaccaccctgaacaaccgtaatcaacgttttacggactcgctggagattcttcgcgagaattacgtgtttaaaggcaacgacgatactgcgctggaatttcgtcgtgctatctccgtgctgaaaagccttccgtttgaggtacgtagcctgaaagacacggaaggattgccctggatcagtgatgaagtcaaagggattatggaagaaatcatcgaagtcggggagtcgcgtgaagtgcaggccgtgctcaatgatgagtggtatcaaagcttccacgcatttacgcgtgtctttggagtgggggtgaagacagcagacaagtggtaccgcatgggtctgcgcaccctggaggatgttcgttccagcaagaccctgaagttgaccacgtgggcgaaagtaggtctgacgtattatgaagatcttgctcgcggcgttacccgtgcggaagctgacgcgatttggctgctggttcaggatgcagtcgcaactttcgacccggatgcgatcgtggagattgtcggtggacagcgtcgtgggaaacctcagtctcacgacgttgatctgcttatcagttctccgggagctgaaaaagagcaagaagaccaactcctgcagaaagtgatgaatctgtggaagaaacaagggttgttgctgtgtggtaaactggcgtatagtcagtgggaatgggggggtctgccgtccggtaaggctgatgagggtgacggggaggcatcgtgctttctgatcctcaaactttatgatcatctggtgcgtaaaagtaaacgcaatatgccgactggttcgaacatgggcgagtccaaaccgtggaaagcaattaaagtagatctgctgcgttgcccccgcggcagttttgcgtttgcgatgttgcagtggaccggaagccgcatgttccgtcgtgatctgcgcgattacgcccgcgaagagaagaacatgatgctggacaatcatagcctgtatgacatgactcgtggtatccaactccctgctaaatcggaagaggaaattttcgaacatctggggcttgaatacctggaaccgttcgaacgtaacgca

SEQ ID NO: 5128 - protein, 529 aa, synthetic construct
  REGION 1..529: note = Variant of terminal deoxynucleotidyltransferase
MHHHHHHGGSGSHGIRTIDSDFGKKQQKKGDNHDSSATYEIKFHEFVLFILEEKMGATRRTFLTDLARKKGFRVENELTDEVTHIVAENLSRSEVLAWLKEHKMEKTKQFELLDISWLIESMKVGKPVDTKGKYQLAESVEVSANPDPTEGRVNELPPTMKTVSPYACQRRTTLNNRNQRFTDSLEILRENYVFKGNDDTALEFRRAISVLKSLPFEVRSLKDTEGLPWISDEVKGIMEEIIEVGESREVQAVLNDEWYQSFHAFTRVFGVGVKTADKWYRMGLRTLEDVRSSKTLKLTTWAKVGLTYYEDLARGVTRAEADAIWLLVQDAVATFDPDAIVEIVGGQRRGKPQSHDVDLLISSPGAEKEQEDQLLQKVMNLWKKQGLLLCGKLAYSQWEWGGLPSGKADEGDGEASCFLILKLYDHLVRKSKRNMPTGSNMGESKPWKAIKVDLLRCPRGSFAFAMLQWTGSRMFRRDLRDYAREEKNMMLDNHSLYDMTRGIQLPAKSEEEIFEHLGLEYLEPFERNA

SEQ ID NO: 5129 - DNA, 1587 bp, synthetic construct
  misc_feature 1..1587: note = Variant of terminal deoxynucleotidyltransferase
  source 1..1587: mol_type = other DNA
atgcaccatcatcatcatcatggcggtagcggcagccacggcattcgtaccatcgattcggacttcgggaagaaacagcagaaaaaaggcgataaccacgatagttccgccacttatgaaatcaaatttcacgagtttgtgctgttcattctcgaagaaaaaatgggtgcgacgcgtcgtacttttctgacagatttagcccgcaagaaagggttccgcgtcgagaatgaactgaccgacgaagttacccacatcgtggcagaaaatctgtcacgctctgaagtattggcttggctgaaagaacacaagatggagaagaccaagcaattcgaactgctggatattagctggcttatcgaaagcatgaaagttggtaaaccggtggacaccaaggggaaataccagttggcggaatcggttgaggtgagtgcgaacccagatccgacagaaggtcgtgtaaacgagctgcctcctactatgaaaaccgtttctccgtatgcgtgtcaacgccgcaccaccctgaacaaccgtaatcaacgttttacggactcgctggagattcttcgcgagaattacgtgtttaaaggcaacgacgatactgcgctggaatttcgtcgtgctatctccgtgctgaaaagccttccgtttgaggtacgtagcctgaaagacacggaaggattgccctggatcagtgatgaagtcaaagggattatggaagaaatcatcgaagtcggggagtcgcgtgaagtgcaggccgtgctcaatgatgagtggtatcaaagcttccacgcatttacgcgtgtctttggagtgggggtgaagacagcagacaagtggtacgggatgggtctgcgcaccctggaggatgttcgttccagcaagaccctgaagttgaccacgtgggcgaaagtaggtctgacgtattatgaagatcttgctcgcggcgttacccgtgcggaagctgacgcgatttggctgctggttcaggatgcagtcgcaactttcgacccggatgcgatcgtggagattgtcggtggacagcgtcgtgggaaacctcagtctcacgacgttgatctgcttatcagttctccgggagctgaaaaagagcaagaagaccaactcctgcagaaagtgatgaatctgtggaagaaacaagggttgttgctgtgtggtcgtctggaatggagtcagtgggaatgggggggtctgccgtccggtaaggctgatgagggtgacggggaggcatcgtgctttctgatcctcaaactttatgatcatctggtgcgtaaaagtaaacgcaatatgccgactggttcgaacatgggcgagtccaaaccgtggaaagcaattaaagtagatctgctgcgttgcccccgcggcagttttgcgtttgcgatgttgcagtggaccggaagccgcatgttccgtcgtgatctgcgcgattacgcccgcgaagagaagaacatgatgctggacaatcatagcctgtatgacatgactcgtggtatccaactccctgctaaatcggaagaggaaattttcgaacatctggggcttgaatacctggaaccgttcgaacgtaacgca

SEQ ID NO: 5130 - protein, 529 aa, synthetic construct
  REGION 1..529: note = Variant of terminal deoxynucleotidyltransferase
MHHHHHHGGSGSHGIRTIDSDFGKKQQKKGDNHDSSATYEIKFHEFVLFILEEKMGATRRTFLTDLARKKGFRVENELTDEVTHIVAENLSRSEVLAWLKEHKMEKTKQFELLDISWLIESMKVGKPVDTKGKYQLAESVEVSANPDPTEGRVNELPPTMKTVSPYACQRRTTLNNRNQRFTDSLEILRENYVFKGNDDTALEFRRAISVLKSLPFEVRSLKDTEGLPWISDEVKGIMEEIIEVGESREVQAVLNDEWYQSFHAFTRVFGVGVKTADKWYGMGLRTLEDVRSSKTLKLTTWAKVGLTYYEDLARGVTRAEADAIWLLVQDAVATFDPDAIVEIVGGQRRGKPQSHDVDLLISSPGAEKEQEDQLLQKVMNLWKKQGLLLCGRLEWSQWEWGGLPSGKADEGDGEASCFLILKLYDHLVRKSKRNMPTGSNMGESKPWKAIKVDLLRCPRGSFAFAMLQWTGSRMFRRDLRDYAREEKNMMLDNHSLYDMTRGIQLPAKSEEEIFEHLGLEYLEPFERNA

SEQ ID NO: 5131 - DNA, 1587 bp, synthetic construct
  misc_feature 1..1587: note = Variant of terminal deoxynucleotidyltransferase
  source 1..1587: mol_type = other DNA
atgcaccatcatcatcatcatggcggtagcggcagccacggcattcgtaccatcgattcggacttcgggaagaaacagcagaaaaaaggcgataaccacgatagttccgccacttatgaaatcaaatttcacgagtttgtgctgttcattctcgaagaaaaaatgggtgcgacgcgtcgtacttttctgacagatttagcccgcaagaaagggttccgcgtcgagaatgaactgaccgacgaagttacccacatcgtggcagaaaatctgtcacgctctgaagtattggcttggctgaaagaacacaagatggagaagaccaagcaattcgaactgctggatattagctggcttatcgaaagcatgaaagttggtaaaccggtggacaccaaggggaaataccagttggcggaatcggttgaggtgagtgcgaacccagatccgacagaaggtcgtgtaaacgagctgcctcctactatgaaaaccgtttctccgtatgcgtgtcaacgccgcaccaccctgaacaaccgtaatcaacgttttacggactcgctggagattcttcgcgagaattacgtgtttaaaggcaacgacgatactgcgctggaatttcgtcgtgctatctccgtgctgaaaagccttccgtttgaggtacgtagcctgaaagacacggaaggattgccctggatcagtgatgaagtcaaagggattatggaagaaatcatcgaagtcggggagtcgcgtgaagtgcaggccgtgctcaatgatgagtggtatcaaagcttccacgcatttacgcgtgtctttggagtgggggtgaagacagcagacaagtggtaccgcatgggtctgcgcaccctggaggatgttcgttccagcaagaccctgaagattaccccgtggcagaaagtaggtctgacgtattatgaagatcttgctcgcggcgttacccgtgcggaagctgacgcgatttggctgctggttcaggatgcagtcgcaactttcgacccggatgcgatcgtggagattgtcggtggacagcgtcgtgggaaacctcagtctcacgacgttgatctgcttatcagttctccgggagctgaaaaagagcaagaagaccaactcctgcagaaagtgatgaatctgtggaagaaacaagggttgttgctgtgtggtcgtctggaatggagtcagtgggaatgggggggtctgccgtccggtaaggctgatgagggtgacggggaggcatcgtgctttctgatcctcaaactttatgatcatctggtgcgtaaaagtaaacgcaatatgccgactggttcgaacatgggcgagtccaaaccgtggaaagcaattaaagtagatctgctgcgttgcccccgcggcagttttgcgtttgcgatgttgcagtggaccggaagccgcatgttccgtcgtgatctgcgcgattacgcccgcgaagagaagaacatgatgctggacaatcatagcctgtatgacatgactcgtggtatccaactccctgctaaatcggaagaggaaattttcgaacatctggggcttgaatacctggaaccgttcgaacgtaacgca

SEQ ID NO: 5132 - protein, 529 aa, synthetic construct
  REGION 1..529: note = Variant of terminal deoxynucleotidyltransferase
MHHHHHHGGSGSHGIRTIDSDFGKKQQKKGDNHDSSATYEIKFHEFVLFILEEKMGATRRTFLTDLARKKGFRVENELTDEVTHIVAENLSRSEVLAWLKEHKMEKTKQFELLDISWLIESMKVGKPVDTKGKYQLAESVEVSANPDPTEGRVNELPPTMKTVSPYACQRRTTLNNRNQRFTDSLEILRENYVFKGNDDTALEFRRAISVLKSLPFEVRSLKDTEGLPWISDEVKGIMEEIIEVGESREVQAVLNDEWYQSFHAFTRVFGVGVKTADKWYRMGLRTLEDVRSSKTLKITPWQKVGLTYYEDLARGVTRAEADAIWLLVQDAVATFDPDAIVEIVGGQRRGKPQSHDVDLLISSPGAEKEQEDQLLQKVMNLWKKQGLLLCGRLEWSQWEWGGLPSGKADEGDGEASCFLILKLYDHLVRKSKRNMPTGSNMGESKPWKAIKVDLLRCPRGSFAFAMLQWTGSRMFRRDLRDYAREEKNMMLDNHSLYDMTRGIQLPAKSEEEIFEHLGLEYLEPFERNA

SEQ ID NO: 5133 - DNA, 1587 bp, synthetic construct
  misc_feature 1..1587: note = Variant of terminal deoxynucleotidyltransferase
  source 1..1587: mol_type = other DNA
atgcaccatcatcatcatcatggcggtagcggcagccacggcattcgtaccatcgattcggacttcgggaagaaacagcagaaaaaaggcgataaccacgatagttccgccacttatgaaatcaaatttcacgagtttgtgctgttcattctcgaagaaaaaatgggtgcgacgcgtcgtacttttctgacagatttagcccgcaagaaagggttccgcgtcgagaatgaactgaccgacgaagttacccacatcgtggcagaaaatctgtcacgctctgaagtattggcttggctgaaagaacacaagatggagaagaccaagcaattcgaactgctggatattagctggcttatcgaaagcatgaaagttggtaaaccggtggacaccaaggggaaataccagttggcggaatcggttgaggtgagtgcgaacccagatccgacagaaggtcgtgtaaacgagctgcctcctactatgaaaaccgtttctccgtatgcgtgtcaacgccgcaccaccctgaacaaccgtaatcaacgttttacggactcgctggagattcttcgcgagaattacgtgtttaaaggcaacgacgatactgcgctggaatttcgtcgtgctatctccgtgctgaaaagccttccgtttgaggtacgtagcctgaaagacacggaaggattgccctggatcagtgatgaagtcaaagggattatggaagaaatcatcgaagtcggggagtcgcgtgaagtgcaggccgtgctcaatgatgagtggtatcaaagcttccacgcatttacgcgtgtctttggagtgggggtgaagacagcagacaagtggtaccgcatgggtctgcgcaccctggaggatgttcgttccagcaagaccctgaagttgaccacgtgggcgaaagtaggtctgacgtattatgaagatcttgctcgcggcgttacccgtgcggaagctgacgcgatttggctgctggttcaggatgcagtcgcaactttcgacccggatgcgatcgtggagattgtcggtggacagcgtcgtgggaaacctcagtctcacgacgttgatctgcttatcagttctccgggagctgaaaaagagcaagaagaccaactcctgcagaaagtgatgaatctgtggaagaaacaagggttgttgctgtgtggtcgtctggaatggagtcagtgggaatgggggggtctgccgtccggtaaggctgatgagggtgacggggaggcatcgtgctttctgatcctcaaactttatgatcatctggtgcgtaaaagtaaacgcaatatgccgactggttcgaacatgggcgagtccaaaccgtggaaagcaattaaagtagatctgctgcgttgcccccgcagcagtttcgcgtttgcgatgttgcagtggaccggaagccgcatgttccgtcgtgatctgcgcgattacgcccgcgaagagaagaacatgatgctggacaatcatagcctgtatgacatgactcgtggtatccaactccctgctaaatcggaagaggaaattttcgaacatctggggcttgaatacctggaaccggctgaacgtaacgca

SEQ ID NO: 5134 - protein, 529 aa, synthetic construct
  REGION 1..529: note = Variant of terminal deoxynucleotidyltransferase
MHHHHHHGGSGSHGIRTIDSDFGKKQQKKGDNHDSSATYEIKFHEFVLFILEEKMGATRRTFLTDLARKKGFRVENELTDEVTHIVAENLSRSEVLAWLKEHKMEKTKQFELLDISWLIESMKVGKPVDTKGKYQLAESVEVSANPDPTEGRVNELPPTMKTVSPYACQRRTTLNNRNQRFTDSLEILRENYVFKGNDDTALEFRRAISVLKSLPFEVRSLKDTEGLPWISDEVKGIMEEIIEVGESREVQAVLNDEWYQSFHAFTRVFGVGVKTADKWYRMGLRTLEDVRSSKTLKLTTWAKVGLTYYEDLARGVTRAEADAIWLLVQDAVATFDPDAIVEIVGGQRRGKPQSHDVDLLISSPGAEKEQEDQLLQKVMNLWKKQGLLLCGRLEWSQWEWGGLPSGKADEGDGEASCFLILKLYDHLVRKSKRNMPTGSNMGESKPWKAIKVDLLRCPRSSFAFAMLQWTGSRMFRRDLRDYAREEKNMMLDNHSLYDMTRGIQLPAKSEEEIFEHLGLEYLEPAERNA

SEQ ID NO: 5135 - DNA, 1587 bp, synthetic construct
  misc_feature 1..1587: note = Variant of terminal deoxynucleotidyltransferase
  source 1..1587: mol_type = other DNA
atgcaccatcatcatcatcatggcggtagcggcagccacggcattcgtaccatcgattcggacttcgggaagaaacagcagaaaaaaggcgataaccacgatagttccgccacttatgaaatcaaatttcacgagtttgtgctgttcattctcgaagaaaaaatgggtgcgacgcgtcgtacttttctgacagatttagcccgcaagaaagggttccgcgtcgagaatgaactgaccgacgaagttacccacatcgtggcagaaaatctgtcacgctctgaagtattggcttggctgaaagaacacaagatggagaagaccaagcaattcgaactgctggatattagctggcttatcgaaagcatgaaagttggtaaaccggtggacaccaaggggaaataccagttggcggaatcggttgaggtgagtgcgaacccagatccgacagaaggtcgtgtaaacgagctgcctcctactatgaaaaccgtttctccgtatgcgtgtcaacgccgcaccaccctgaacaaccgtaatcaacgttttacggactcgctggagattcttcgcgagaattacgtgtttaaaggcaacgacgatactgcgctggaatttcgtcgtgctatctccgtgctgaaaagccttccgtttgaggtacgtagcctgaaagacacggaaggattgccctggatcagtgatgaagtcaaagggattatggaagaaatcatcgaagtcggggagtcgcgtgaagtgcaggccgtgctcaatgatgagtggtatcaaagcttccacgcatttacgcgtgtctttggagtgggggtgaagacagcagacaagtggtaccgcatgggtctgcgcaccctggaggatgttcgttccagcaagaccctgaagtttaccacgtgggcgaaagtaggtctgacgtattatgaagatcttgctcgcggcgttacccgtgcggaagctgacgcgatttggctgctggttcaggatgcagtcgcaactttcgacccggatgcgatcgtggagattgtcggtggacagcgtcgtgggaaacctcagtctcacgacgttgatctgcttatcagttctccgggagctgaaaaagagcaagaagaccaactcctgcagaaagtgatgaatctgtggaagaaacaagggttgttgctgtgtggtcgtgtggtgtggagtcagtgggaatgggggggtctgccgtccggtaaggctgatgagggtgacggggaggcatcgtgctttctgatcctcaaactttatgatcatctggtgcgtaaaagtaaacgcaatatgccgactggttcgaacatgggcgagtccaaaccgtggaaagcaattaaagtagatctgctgcgttgcccccgcggcagttttgcgtttgcgatgttgcagtggaccggaagccgcatgttccgtctggatctgcgcgattacgcccgcgaagagaagaacatgatgctggacaatcatcaactgtatgacatgactcgtggtatccaactccctgctaaatcggaagaggaaattttcgaacatctggggcttgaatacctggaaccgttcgaacgtaacgca

SEQ ID NO: 5136 - protein, 529 aa, synthetic construct
  REGION 1..529: note = Variant of terminal deoxynucleotidyltransferase
MHHHHHHGGSGSHGIRTIDSDFGKKQQKKGDNHDSSATYEIKFHEFVLFILEEKMGATRRTFLTDLARKKGFRVENELTDEVTHIVAENLSRSEVLAWLKEHKMEKTKQFELLDISWLIESMKVGKPVDTKGKYQLAESVEVSANPDPTEGRVNELPPTMKTVSPYACQRRTTLNNRNQRFTDSLEILRENYVFKGNDDTALEFRRAISVLKSLPFEVRSLKDTEGLPWISDEVKGIMEEIIEVGESREVQAVLNDEWYQSFHAFTRVFGVGVKTADKWYRMGLRTLEDVRSSKTLKFTTWAKVGLTYYEDLARGVTRAEADAIWLLVQDAVATFDPDAIVEIVGGQRRGKPQSHDVDLLISSPGAEKEQEDQLLQKVMNLWKKQGLLLCGRVVWSQWEWGGLPSGKADEGDGEASCFLILKLYDHLVRKSKRNMPTGSNMGESKPWKAIKVDLLRCPRGSFAFAMLQWTGSRMFRLDLRDYAREEKNMMLDNHQLYDMTRGIQLPAKSEEEIFEHLGLEYLEPFERNA

SEQ ID NO: 5137 - DNA, 1587 bp, synthetic construct
  misc_feature 1..1587: note = Variant of terminal deoxynucleotidyltransferase
  source 1..1587: mol_type = other DNA
atgcaccatcatcatcatcatggcggtagcggcagccacggcattcgtaccatcgattcggacttcgggaagaaacagcagaaaaaaggcgataaccacgatagttccgccacttatgaaatcaaatttcacgagtttgtgctgttcattctcgaagaaaaaatgggtgcgacgcgtcgtacttttctgacagatttagcccgcaagaaagggttccgcgtcgagaatgaactgaccgacgaagttacccacatcgtggcagaaaatctgtcacgctctgaagtattggcttggctgaaagaacacaagatggagaagaccaagcaattcgaactgctggatattagctggcttatcgaaagcatgaaagttggtaaaccggtggacaccaaggggaaataccagttggcggaatcggttgaggtgagtgcgaacccagatccgacagaaggtcgtgtaaacgagctgcctcctactatgaaaaccgtttctccgtatgcgtgtcaacgccgcaccaccctgaacaaccgtaatcaacgttttacggactcgctggagattcttcgcgagaattacgtgctgaaaggcaacccggatactgcgctggaatttcgtcgtgctatctccgtgctgaaaagccttccgtttgaggtacgtagcctgaaagacacggaaggattgccctggatcagtgatgaagtcaaagggattatggaagaaatcatcgaagtcggggagtcgcgtgaagtgcaggccgtgctcaatgatgagtggtatcaaagcttccacgcatttacgcgtgtctttggagtgggggtgaagacagcagacaagtggtaccgcatgggtctgcgcaccctggaggatgttcgttccagcaagaccctgaagttgaccacgtgggcgaaagtaggtctgacgtattatgaagatcttgctcgcggcgttacccgtgcggaagctgacgcgatttggctgctggttcaggatgcagtcgcaactttcgacccggatgcgatcgtggagattgtcggtggacagcgtcgtgggaaacctcagtctcacgacgttgatctgcttatcagttctccgggagctgaaaaagagcaagaagaccaactcctgcagaaagtgatgaatctgtggaagaaacaagggttgttgctgtgtggtcgtctggaatggagtcagtgggaatgggggggtctgccgtccggtaaggctgatgagggtgacggggaggcatcgtgctttctgatcctcaaactttatgatcatctggtgcgtaaaagtaaacgcaatatgccgactggttcgaacatgggcgagtccaaaccgtggaaagcaattaaagtagatctgctgcgttgcccccgcggcagttttgcgtttgcgatgttgcagtggaccggaagccgcatgttccgtcgtgatctgcgcgattacgcccgcgaagagaagaacatgatgctggacaatcatagcctgtatgacatgactcgtggtatccaactccctgctaaatcggaagaggaaattttcgaacatctggggcttgaatacctggaaccgttcgaacgtaacgca

SEQ ID NO: 5138 - protein, 529 aa, synthetic construct
  REGION 1..529: note = Variant of terminal deoxynucleotidyltransferase
MHHHHHHGGSGSHGIRTIDSDFGKKQQKKGDNHDSSATYEIKFHEFVLFILEEKMGATRRTFLTDLARKKGFRVENELTDEVTHIVAENLSRSEVLAWLKEHKMEKTKQFELLDISWLIESMKVGKPVDTKGKYQLAESVEVSANPDPTEGRVNELPPTMKTVSPYACQRRTTLNNRNQRFTDSLEILRENYVLKGNPDTALEFRRAISVLKSLPFEVRSLKDTEGLPWISDEVKGIMEEIIEVGESREVQAVLNDEWYQSFHAFTRVFGVGVKTADKWYRMGLRTLEDVRSSKTLKLTTWAKVGLTYYEDLARGVTRAEADAIWLLVQDAVATFDPDAIVEIVGGQRRGKPQSHDVDLLISSPGAEKEQEDQLLQKVMNLWKKQGLLLCGRLEWSQWEWGGLPSGKADEGDGEASCFLILKLYDHLVRKSKRNMPTGSNMGESKPWKAIKVDLLRCPRGSFAFAMLQWTGSRMFRRDLRDYAREEKNMMLDNHSLYDMTRGIQLPAKSEEEIFEHLGLEYLEPFERNA

SEQ ID NO: 5139 - DNA, 1587 bp, synthetic construct
  misc_feature 1..1587: note = Variant of terminal deoxynucleotidyltransferase
  source 1..1587: mol_type = other DNA
atgcaccatcatcatcatcatggcggtagcggcagccacggcattcgtaccatcgattcggacttcgggaagaaacagcagaaaaaaggcgataaccacgatagttccgccacttatgaaatcaaatttcacgagtttgtgctgttcattctcgaagaaaaaatgggtgcgacgcgtcgtacttttctgacagatttagcccgcaagaaagggttccgcgtcgagaatgaactgaccgacgaagttacccacatcgtggcagaaaatctgtcacgctctgaagtattggcttggctgaaagaacacaagatggagaagaccaagcaattcgaactgctggatattagctggcttatcgaaagcatgaaagttggtaaaccggtggacaccaaggggaaataccagttggcggaatcggttgaggtgagtgcgaacccagatccgacagaaggtcgtgtaaacgagctgcctcctactatgaaaaccgtttctccgtatgcgtgtcaacgccgcaccaccctgaacaaccgtaatcaacgttttacggactcgctggagattcttcgcgagaattacgtgtttaaaggcaacgacgatactgcgctggaatttcgtcgtgctatctccgtgctgaaaagccttccgtttgaggtacgtagcctgaaagacacggaaggattgccctggatcagtgatgaagtcaaagggattatggaagaaatcatcgaagtcggggagtcgcgtgaagtgcaggccgtgctcaatgatgagtggtatcaaagcttccacgcatttacgcgtgtctttggagtgggggtgaagacagcagacaagtggtaccgcatgggtctgcgcaccctcgaggatgcgcgttccagcaagaccctgaagttgaccacgtgggcgaaagtaggtctgacgtattatgaagatcttgctcgcggcgttacccgtgcggaagctgacgcgatttggctgctggttcaggatgcagtcgcaactttcgacccggatgcgatcgtggagattgtcggtggacagcgtcgtgggaaacctcagtctcacgacgttgatctgcttatcagttctccgggagctgaaaaagagcaagaagaccaactcctgcagaaagtgatgaatctgtggaagaaacaagggttgttgctgtgtggtcgtctggaatggagtcagtgggaatgggggggtctgccgtccggtaaggctgatgagggtgacggggaggcatcgtgctttctgatcctcaaactttatgatcatctggtgcgtaaaagtaaacgcaatatgccgactggttcgaacatgggcgagtccaaaccgtggaaagcaattaaagtagatctgctgcgttgcccccgcggcagttttgcgtttgcgatgttgcagtggaccggaagccgcatgttccgtcgtgatctgcgcgattacgcccgcgaagagaagaacatgatgctggacaatcatagcctgtatgacatgactcgtggtatccaactccctgctaaatcggaagaggaaattttcgaacatctggggcttgaatacctggaaccgttcgaacgtaacgca

SEQ ID NO: 5140 - protein, 529 aa, synthetic construct
  REGION 1..529: note = Variant of terminal deoxynucleotidyltransferase
MHHHHHHGGSGSHGIRTIDSDFGKKQQKKGDNHDSSATYEIKFHEFVLFILEEKMGATRRTFLTDLARKKGFRVENELTDEVTHIVAENLSRSEVLAWLKEHKMEKTKQFELLDISWLIESMKVGKPVDTKGKYQLAESVEVSANPDPTEGRVNELPPTMKTVSPYACQRRTTLNNRNQRFTDSLEILRENYVFKGNDDTALEFRRAISVLKSLPFEVRSLKDTEGLPWISDEVKGIMEEIIEVGESREVQAVLNDEWYQSFHAFTRVFGVGVKTADKWYRMGLRTLEDARSSKTLKLTTWAKVGLTYYEDLARGVTRAEADAIWLLVQDAVATFDPDAIVEIVGGQRRGKPQSHDVDLLISSPGAEKEQEDQLLQKVMNLWKKQGLLLCGRLEWSQWEWGGLPSGKADEGDGEASCFLILKLYDHLVRKSKRNMPTGSNMGESKPWKAIKVDLLRCPRGSFAFAMLQWTGSRMFRRDLRDYAREEKNMMLDNHSLYDMTRGIQLPAKSEEEIFEHLGLEYLEPFERNA

SEQ ID NO: 5141 - DNA, 1587 bp, synthetic construct
  misc_feature 1..1587: note = Variant of terminal deoxynucleotidyltransferase
  source 1..1587: mol_type = other DNA
atgcaccatcatcatcatcatggcggtagcggcagccacggcattcgtaccatcgattcggacttcgggaagaaacagcagaaaaaaggcgataaccacgatagttccgccacttatgaaatcaaatttcacgagtttgtgctgttcattctcgaagaaaaaatgggtgcgacgcgtcgtacttttctgacagatttagcccgcaagaaagggttccgcgtcgagaatgaactgaccgacgaagttacccacatcgtggcagaaaatctgtcacgctctgaagtattggcttggctgaaagaacacaagatggagaagaccaagcaattcgaactgctggatattagctggcttatcgaaagcatgaaagttggtaaaccggtggacaccaaggggaaataccagttggcggaatcggttgaggtgagtgcgaacccagatccgacagaaggtcgtgtaaacgagctgcctcctactatgaaaaccgtttctccgtatgcgtgtcaacgccgcaccaccctgaacaaccgtaatcaacgttttacggactcgctggagattcttcgcgagaattacgtgtttaaaggcaacgacgatactgcgctggaatttcgtcgtgctatctccgtgctgaaaagccttccgtttgaggtacgtagcctgaaagacacggaaggattgccctggatcagtgatgaagtcaaagggattatggaagaaatcatcgaagtcggggagtcgcgtgaagtgcaggccgtgctcaatgatgagtggtatcaaagcttccacgcatttacgcgtgtctttggagtgggggtgaagacagcagacaagtggtaccgcatgggtctgcgcaccctggaggatgttcgttccagcaagaccctgaagttgaccacgtgggcgaaagtaggtctgacgtattatgaagatcttgctcgcggcgttacccgtgcggaagctgacgcgatttggctgctggttcaggatgcagtcgcaactttcgacccggatgcgatcgtggagattgtcggtggacagcgtcgtgggaaacctcagtctcacgacgttgatctgcttatcagttctccgggagctgaaaaagagcaagaagaccaactcctgcagaaagtgatgaatctgtggaagaaacaagggttgttgctgtgtggtcgtgtggcgtggagtcagtgggaatgggggggtctgccgtccggtaaggctgatgagggtgacggggaggcatcgtgctttctgatcctcaaactttatgatcatctggtgcgtaaaagtaaacgcaatatgccgactggttcgaacatgggcgagtccaaaccgtggaaagcaattaaagtagatctgctgcgttgcccccgcggcagttttgcgtttgcgatgttgcagtggaccggaagccgcatgttccgtcgcgatctgcgcgattacgcccgcgaagagaagaacatgatgctggacaatcatagcctgtatgacatgactcgtggtatccaactccctgctaaatcggaagaggaaattttcgaacatctggggcttgaatacctggaaccgttcgaacgtaacgca

SEQ ID NO: 5142 - protein, 529 aa, synthetic construct
  REGION 1..529: note = Variant of terminal deoxynucleotidyltransferase
MHHHHHHGGSGSHGIRTIDSDFGKKQQKKGDNHDSSATYEIKFHEFVLFILEEKMGATRRTFLTDLARKKGFRVENELTDEVTHIVAENLSRSEVLAWLKEHKMEKTKQFELLDISWLIESMKVGKPVDTKGKYQLAESVEVSANPDPTEGRVNELPPTMKTVSPYACQRRTTLNNRNQRFTDSLEILRENYVFKGNDDTALEFRRAISVLKSLPFEVRSLKDTEGLPWISDEVKGIMEEIIEVGESREVQAVLNDEWYQSFHAFTRVFGVGVKTADKWYRMGLRTLEDVRSSKTLKLTTWAKVGLTYYEDLARGVTRAEADAIWLLVQDAVATFDPDAIVEIVGGQRRGKPQSHDVDLLISSPGAEKEQEDQLLQKVMNLWKKQGLLLCGRVAWSQWEWGGLPSGKADEGDGEASCFLILKLYDHLVRKSKRNMPTGSNMGESKPWKAIKVDLLRCPRGSFAFAMLQWTGSRMFRRDLRDYAREEKNMMLDNHSLYDMTRGIQLPAKSEEEIFEHLGLEYLEPFERNA

SEQ ID NO: 5143 - DNA, 1587 bp, synthetic construct
  misc_feature 1..1587: note = Variant of terminal deoxynucleotidyltransferase
  source 1..1587: mol_type = other DNA
atgcaccatcatcatcatcatggcggtagcggcagccacggcattcgtaccatcgattcggacttcgggaagaaacagcagaaaaaaggcgataaccacgatagttccgccacttatgaaatcaaatttcacgagtttgtgctgttcattctcgaagaaaaaatgggtgcgacgcgtcgtacttttctgacagatttagcccgcaagaaagggttccgcgtcgagaatgaactgaccgacgaagttacccacatcgtggcagaaaatctgtcacgctctgaagtattggcttggctgaaagaacacaagatggagaagaccaagcaattcgaactgctggatattagctggcttatcgaaagcatgaaagttggtaaaccggtggacaccaaggggaaataccagttggcggaatcggttgaggtgagtgcgaacccagatccgacagaaggtcgtgtaaacgagctgcctcctactatgaaaaccgtttctccgtatgcgtgtcaacgccgcaccaccctgaacaaccgtaatcaacgttttacggactcgctggagattcttcgcgagaattacgtgtttaaaggcaacgacgatactgcgctggaatttcgtcgtgctatctccgtgctgaaaagccttccgtttgaggtacgtagcctgaaagacacggaaggattgccctggatcagtgatgaagtcaaagggattatggaagaaatcatcgaagtcggggagtcgcgtgaagtgcaggccgtgctcaatgatgagtggtatcaaagcttccacgcatttacgcgtgtctttggagtgggggtgaagacagcagacaagtggtaccgcatgggtctgcgcaccctggaggatgttcgttccagcaagaccctgaagttgaccacgtgggcgaaagtaggtctgacgtattatgaagatcttgctctgggcgttacgcgtgcggaagctgacgcgatttggctgctggttcaggatgcagtcgcaactttcgacccggatgcgatcgtggagattgtcggtggacagcgtcgtgggaaacctcagtctcacgacgttgatctgcttatcagttctccgggagctgaaaaagagcaagaagaccaactcctgcagaaagtgatgaatctgtggaagaaacaagggttgttgctgtgtggtcgtctggaatggagtcagtgggaatgggggggtctgccgtccggtaaggctgatgagggtgacggggaggcatcgtgctttctgatcctcaaactttatgatcatctggtgcgtaaaagtaaacgcaatatgccgactggttcgaacatgggcgagtccaaaccgtggaaagcaattaaagtagatctgctgcgttgcccccgcggcagttttgcgtttgcgatgttgcagtggaccggaagccgcatgttccgtcgtgatctgcgcgattacgcccgcgaagagaagaacatgatgctggacaatcatagcctgtatgacatgactcgtggtatccaactccctgctaaatcggaagaggaaattttcgaacatctggggcttgaatacctggaaccgttcgaacgtaacgca

SEQ ID NO: 5144 - protein, 529 aa, synthetic construct
  REGION 1..529: note = Variant of terminal deoxynucleotidyltransferase
MHHHHHHGGSGSHGIRTIDSDFGKKQQKKGDNHDSSATYEIKFHEFVLFILEEKMGATRRTFLTDLARKKGFRVENELTDEVTHIVAENLSRSEVLAWLKEHKMEKTKQFELLDISWLIESMKVGKPVDTKGKYQLAESVEVSANPDPTEGRVNELPPTMKTVSPYACQRRTTLNNRNQRFTDSLEILRENYVFKGNDDTALEFRRAISVLKSLPFEVRSLKDTEGLPWISDEVKGIMEEIIEVGESREVQAVLNDEWYQSFHAFTRVFGVGVKTADKWYRMGLRTLEDVRSSKTLKLTTWAKVGLTYYEDLALGVTRAEADAIWLLVQDAVATFDPDAIVEIVGGQRRGKPQSHDVDLLISSPGAEKEQEDQLLQKVMNLWKKQGLLLCGRLEWSQWEWGGLPSGKADEGDGEASCFLILKLYDHLVRKSKRNMPTGSNMGESKPWKAIKVDLLRCPRGSFAFAMLQWTGSRMFRRDLRDYAREEKNMMLDNHSLYDMTRGIQLPAKSEEEIFEHLGLEYLEPFERNA

SEQ ID NO: 5145 - DNA, 1587 bp, synthetic construct
  misc_feature 1..1587: note = Variant of terminal deoxynucleotidyltransferase
  source 1..1587: mol_type = other DNA
atgcaccatcatcatcatcatggcggtagcggcagccacggcattcgtaccatcgattcggacttcgggaagaaacagcagaaaaaaggcgataaccacgatagttccgccacttatgaaatcaaatttcacgagtttgtgctgttcattctcgaagaaaaaatgggtgcgacgcgtcgtacttttctgacagatttagcccgcaagaaagggttccgcgtcgagaatgaactgaccgacgaagttacccacatcgtggcagaaaatctgtcacgctctgaagtattggcttggctgaaagaacacaagatggagaagaccaagcaattcgaactgctggatattagctggcttatcgaaagcatgaaagttggtaaaccggtggacaccaaggggaaataccagttggcggaatcggttgaggtgagtgcgaacccagatccgacagaaggtcgtgtaaacgagctgcctcctactatgaaaaccgtttctccgtatgcgtgtcaacgccgcaccaccctgaacaaccgtaatcaacgttttacggactcgctggagattcttcgcgagaattacgtgtttaaaggcaacgacgatactgcgctggaatttcgtcgtgctatctccgtgctgaaaagccttccgtttgaggtacgtagcctgaaagacacggaaggattgccctggatcagtgatgaagtcaaagggattatggaagaaatcatcgaagtcggggagtcgcgtgaagtgcaggccgtgctcaatgatgagtggtatcaaagcttccacgcatttacgcgtgtctttggagtgggggtgaagacagcagacaagtggtaccgcatgggtctgcgcaccctggaggatgttcgttccagcaagaccctgaagttgaccacgtgggcgaaagtaggtctgacgtattatgaagatcttgctcgcggcgttacccgtgcggaagctgacgcgatttggctgctggttcaggatgcagtcgcaactttcgacccggatgcgatcgtggagattgtcggtggacagcgtcgtgggaaacctcagtctcacgacgttgatctgcttatcagttctccgggagctgaaaaagagcaagaagaccaactcctgcagaaagtgatgaatctgtggaagaaacaagggttgttgctgtgtggtcgtctggaatggagtcagtgggaatgggggggtctgccgtccggtaagcttgatgagggtgacgcggaggcatcgtgctttctgatcctcaaactttatgatcatctggtgcgtaaaagtaaacgcaatatgccgactggttcgaacatgggcgagtccaaaccgtggaaagcaattaaagtagatctgctgcgttgcccccgcggcagttttgcgtttgcgatgttgcagtggaccggaagccgcatgttccgtcgtgatctgcgcgattacgcccgcgaagagaagaacatgatgctggacaatcatagcctgtatgacatgactcgtggtatccaactccctgctaaatcggaagaggaaattttcgaacatctggggcttgaatacctggaaccgttcgaacgtaacgca

SEQ ID NO: 5146 - protein, 529 aa, synthetic construct
  REGION 1..529: note = Variant of terminal deoxynucleotidyltransferase
MHHHHHHGGSGSHGIRTIDSDFGKKQQKKGDNHDSSATYEIKFHEFVLFILEEKMGATRRTFLTDLARKKGFRVENELTDEVTHIVAENLSRSEVLAWLKEHKMEKTKQFELLDISWLIESMKVGKPVDTKGKYQLAESVEVSANPDPTEGRVNELPPTMKTVSPYACQRRTTLNNRNQRFTDSLEILRENYVFKGNDDTALEFRRAISVLKSLPFEVRSLKDTEGLPWISDEVKGIMEEIIEVGESREVQAVLNDEWYQSFHAFTRVFGVGVKTADKWYRMGLRTLEDVRSSKTLKLTTWAKVGLTYYEDLARGVTRAEADAIWLLVQDAVATFDPDAIVEIVGGQRRGKPQSHDVDLLISSPGAEKEQEDQLLQKVMNLWKKQGLLLCGRLEWSQWEWGGLPSGKLDEGDAEASCFLILKLYDHLVRKSKRNMPTGSNMGESKPWKAIKVDLLRCPRGSFAFAMLQWTGSRMFRRDLRDYAREEKNMMLDNHSLYDMTRGIQLPAKSEEEIFEHLGLEYLEPFERNA

SEQ ID NO: 5147 - DNA, 1587 bp, synthetic construct
  misc_feature 1..1587: note = Variant of terminal deoxynucleotidyltransferase
  source 1..1587: mol_type = other DNA
atgcaccatcatcatcatcatggcggtagcggcagccacggcattcgtaccatcgattcggacttcgggaagaaacagcagaaaaaaggcgataaccacgatagttccgccacttatgaaatcaaatttcacgagtttgtgctgttcattctcgaagaaaaaatgggtgcgacgcgtcgtacttttctgacagatttagcccgcaagaaagggttccgcgtcgagaatgaactgaccgacgaagttacccacatcgtggcagaaaatctgtcacgctctgaagtattggcttggctgaaagaacacaagatggagaagaccaagcaattcgaactgctggatattagctggcttatcgaaagcatgaaagttggtaaaccggtggacaccaaggggaaataccagttggcggaatcggttgaggtgagtgcgaacccagatccgacagaaggtcgtgtaaacgagctgcctcctactatgaaaaccgtttctccgtatgcgtgtcaacgccgcaccaccctgaacaaccgtaatcaacgttttacggactcgctggagattcttcgcgagaattacgtgtttaaaggcaacgacgatactgcgctggaatttcgtcgtgctatctccgtgctgaaaagccttccgtttgaggtacgtagcctgaaagacacggaaggattgccctggatcagtgatgaagtcaaagggattatggaagaaatcatcgaagtcggggagtcgcgtgaagtgcaggccgtgctcaatgatgagtggtatcaaagcttccacgcatttacgcgtgtctttggagtgggggtgaagacagcagacaagtggtaccgcatgggtctgcgcaccctggaggatgttcgttccagcaagaccctgaagttgaccacgtgggcgaaagtaggtctgacgtattatgaagatcttgctcgcggcgttacccgtgcggaagctgacgcgatttggctgctggttcaggatgcagtcgcaactttcgacccggatgcgatcgtggagattgtcggtggacagcgtcgtgggaaaactcagtctcacgacgttgatctgcttatcagttctccgggagctgaaaaagagcaagaagaccaactcctgcagaaagtgatgaatctgtggaagaaacaagggttgttgctgtgtggtcgtctggaatggagtcagtgggaatgggggggtctgccgtccggtaaggctgatgagggtgacggggaggcatcgtgctttctgatcctcaaactttatgatcatctggtgcgtaaaagtaaacgcaatatgccgactggttcgaacatgggcgagtccaaaccgtggaaagcaattaaagtagatctgctgcgttgcccccgcggcagttttgcgtttgcgatgttgcagtggaccggaagccgcatgttccgtcgtgatctgcgcgattacgcccgcgaagagaagaacatgatgctggacaatcatagcctgtatgacatgactcgtggtatccaactccctgctaaatcggaagaggaaattttcgaacatctggggcttgaatacctggaaccgttcgaacgtaacgca

SEQ ID NO: 5148 - protein, 529 aa, synthetic construct
  REGION 1..529: note = Variant of terminal deoxynucleotidyltransferase
MHHHHHHGGSGSHGIRTIDSDFGKKQQKKGDNHDSSATYEIKFHEFVLFILEEKMGATRRTFLTDLARKKGFRVENELTDEVTHIVAENLSRSEVLAWLKEHKMEKTKQFELLDISWLIESMKVGKPVDTKGKYQLAESVEVSANPDPTEGRVNELPPTMKTVSPYACQRRTTLNNRNQRFTDSLEILRENYVFKGNDDTALEFRRAISVLKSLPFEVRSLKDTEGLPWISDEVKGIMEEIIEVGESREVQAVLNDEWYQSFHAFTRVFGVGVKTADKWYRMGLRTLEDVRSSKTLKLTTWAKVGLTYYEDLARGVTRAEADAIWLLVQDAVATFDPDAIVEIVGGQRRGKTQSHDVDLLISSPGAEKEQEDQLLQKVMNLWKKQGLLLCGRLEWSQWEWGGLPSGKADEGDGEASCFLILKLYDHLVRKSKRNMPTGSNMGESKPWKAIKVDLLRCPRGSFAFAMLQWTGSRMFRRDLRDYAREEKNMMLDNHSLYDMTRGIQLPAKSEEEIFEHLGLEYLEPFERNA

SEQ ID NO: 5149 - DNA, 1587 bp, synthetic construct
  misc_feature 1..1587: note = Variant of terminal deoxynucleotidyltransferase
  source 1..1587: mol_type = other DNA
atgcaccatcatcatcatcatggcggtagcggcagccacggcattcgtaccatcgattcggacttcgggaagaaacagcagaaaaaaggcgataaccacgatagttccgccacttatgaaatcaaatttcacgagtttgtgctgttcattctcgaagaaaaaatgggtgcgacgcgtcgtacttttctgacagatttagcccgcaagaaagggttccgcgtcgagaatgaactgaccgacgaagttacccacatcgtggcagaaaatctgtcacgctctgaagtattggcttggctgaaagaacacaagatggagaagaccaagcaattcgaactgctggatattagctggcttatcgaaagcatgaaagttggtaaaccggtggacaccaaggggaaataccagttggcggaatcggttgaggtgagtgcgaacccagatccgacagaaggtcgtgtaaacgagctgcctcctactatgaaaaccgtttctccgtatgcgtgtcaacgccgcaccaccctgaacaaccgtaatcaacgttttacggactcgctggagattcttcgcgagaattacgtgtttaaaggcaacgacgatactgcgctggaatttcgtcgtgctatctccgtgctgaaaagccttccgtttgaggtacgtagcctgaaagacacggaaggattgccctggatcagtgatgaagtcaaagggattatggaagaaatcatcgaagtcggggagtcgcgtgaagtgcaggccgtgctcaatgatgagtggtatcaaagcttccacgcatttacgcgtgtctttggagtgggggtgaagacagcagacaagtggtaccgcatgggtctgcgcaccctggaggatgttcgttccagcaagaccctgaagttgaccacgtgggcgaaagtaggtctgacgaattatgaagatcttgctcgcggcgttacccgtgcggaagctgacgcgatttggctgctggttcaggatgcagtcgcaactttcgacccggatgcgatcgtggagattgtcggtggacagcgtcgtgggaaacctcagtctcacgacgttgatctgcttatcagttctccgggagccgaaaaagagcaagaagaccaactcctgcagaaagtgatgaatctgtggaagaaacaagggttgttgctgtgtggtcgtctggaatggagtcagtgggaatggggcgtgctgccgtccggtaaggctgatgagggtgacggggaggcatcgtgctttctgatcctcaaactttatgatcatctggtgcgtaaaagtaaacgcaatatgccgactggttcgaacatgggcgagtccaaaccgtggaaagcaattaaagtagatctgctgcgttgcccccgcgcgagtttcgcgtttgcgatgttgcagtggaccggaagccgcatgttccgtcgtgatctgcgcgattacgcccgcgaagagaagaacatgatgctggacaatcatagcctgtatgacatgactcgtggtatccaactccctgctaaatcggaagaggaaattttcgaacatctggggcttgaatacctggaaccgttcgaacgtaacgca

SEQ ID NO: 5150 - protein, 529 aa, synthetic construct
  REGION 1..529: note = Variant of terminal deoxynucleotidyltransferase
MHHHHHHGGSGSHGIRTIDSDFGKKQQKKGDNHDSSATYEIKFHEFVLFILEEKMGATRRTFLTDLARKKGFRVENELTDEVTHIVAENLSRSEVLAWLKEHKMEKTKQFELLDISWLIESMKVGKPVDTKGKYQLAESVEVSANPDPTEGRVNELPPTMKTVSPYACQRRTTLNNRNQRFTDSLEILRENYVFKGNDDTALEFRRAISVLKSLPFEVRSLKDTEGLPWISDEVKGIMEEIIEVGESREVQAVLNDEWYQSFHAFTRVFGVGVKTADKWYRMGLRTLEDVRSSKTLKLTTWAKVGLTNYEDLARGVTRAEADAIWLLVQDAVATFDPDAIVEIVGGQRRGKPQSHDVDLLISSPGAEKEQEDQLLQKVMNLWKKQGLLLCGRLEWSQWEWGVLPSGKADEGDGEASCFLILKLYDHLVRKSKRNMPTGSNMGESKPWKAIKVDLLRCPRASFAFAMLQWTGSRMFRRDLRDYAREEKNMMLDNHSLYDMTRGIQLPAKSEEEIFEHLGLEYLEPFERNA

SEQ ID NO: 5151 - DNA, 1587 bp, synthetic construct
  misc_feature 1..1587: note = Variant of terminal deoxynucleotidyltransferase
  source 1..1587: mol_type = other DNA
atgcaccatcatcatcatcatggcggtagcggcagccacggcattcgtaccatcgattcggacttcgggaagaaacagcagaaaaaaggcgataaccacgatagttccgccacttatgaaatcaaatttcacgagtttgtgctgttcattctcgaagaaaaaatgggtgcgacgcgtcgtacttttctgacagatttagcccgcaagaaagggttccgcgtcgagaatgaactgaccgacgaagttacccacatcgtggcagaaaatctgtcacgctctgaagtattggcttggctgaaagaacacaagatggagaagaccaagcaattcgaactgctggatattagctggcttatcgaaagcatgaaagttggtaaaccggtggacaccaaggggaaataccagttggcggaatcggttgaggtgagtgcgaacccagatccgacagaaggtcgtgtaaacgagctgcctcctactatgaaaaccgtttctccgtatgcgtgtcaacgccgcaccaccctgaacaaccgtaatcaacgttttacggactcgctggagattcttcgcactaattacgtgctgaaaggcaacgacgatactgcgctggaatttcgtcgtgctatctccgtgctgaaaagccttccgtttgaggtacgtagcctgaaagacacggaaggattgccctggatcagtgatgaagtcaaagggattatggaagaaatcatcgaagtcggggagtcgcgtgaagtgcaggccgtgctcaatgatgagtggtatcaaagcttccacgcatttacgcgtgtctttggagtgggggtgaagacagcagacaagtggtaccgcatgggtctgcgcaccctggaggatgttcgttccagcaagaccctgaagttgaccacgtgggcgaaagtaggtctgacgtattatgaagatcttgctcgcggcgttacccgtgcggaagctgacgcgatttggctgctggttcaggatgcagtcgcaactttcgacccggatgcgatcgtggagattgtcggtggacagcgtcgtgggaaacctcagtctcacgacgttgatctgcttatcagttctccgggagctgaaaaagagcaagaagaccaactcctgcagaaagtgatgaatctgtggaagaaacaagggttgttgctgtgtggtcgtctggaatggagtcagtgggaatgggggggtctgccgtccggtaaggctgatgagggtgacggggaggcatcgtgctttctgatcctcaaactttatgatcatctggtgcgtaaaagtaaacgcaatatgccgactggttcgaacatgggcgagtccaaaccgtggaaagcaattaaagtagatctgctgcgttgcccccgcggcagttttgcgtttgcgatgttgcagtggaccggaagccgcatgttccgtcgtgatctgcgcgattacgcccgcgaagagaagaacatgatgctggacaatcatagcctgtatgacatgactcgtggtatccaactccctgctaaatcggaagaggaaattttcgaacatctggggcttgaatacctggaaccgttcgaacgtaacgca

SEQ ID NO: 5152 - protein, 529 aa, synthetic construct
  REGION 1..529: note = Variant of terminal deoxynucleotidyltransferase
MHHHHHHGGSGSHGIRTIDSDFGKKQQKKGDNHDSSATYEIKFHEFVLFILEEKMGATRRTFLTDLARKKGFRVENELTDEVTHIVAENLSRSEVLAWLKEHKMEKTKQFELLDISWLIESMKVGKPVDTKGKYQLAESVEVSANPDPTEGRVNELPPTMKTVSPYACQRRTTLNNRNQRFTDSLEILRTNYVLKGNDDTALEFRRAISVLKSLPFEVRSLKDTEGLPWISDEVKGIMEEIIEVGESREVQAVLNDEWYQSFHAFTRVFGVGVKTADKWYRMGLRTLEDVRSSKTLKLTTWAKVGLTYYEDLARGVTRAEADAIWLLVQDAVATFDPDAIVEIVGGQRRGKPQSHDVDLLISSPGAEKEQEDQLLQKVMNLWKKQGLLLCGRLEWSQWEWGGLPSGKADEGDGEASCFLILKLYDHLVRKSKRNMPTGSNMGESKPWKAIKVDLLRCPRGSFAFAMLQWTGSRMFRRDLRDYAREEKNMMLDNHSLYDMTRGIQLPAKSEEEIFEHLGLEYLEPFERNA

SEQ ID NO: 5153 - DNA, 1587 bp, synthetic construct
  misc_feature 1..1587: note = Variant of terminal deoxynucleotidyltransferase
  source 1..1587: mol_type = other DNA
atgcaccatcatcatcatcatggcggtagcggcagccacggcattcgtaccatcgattcggacttcgggaagaaacagcagaaaaaaggcgataaccacgatagttccgccacttatgaaatcaaatttcacgagtttgtgctgttcattctcgaagaaaaaatgggtgcgacgcgtcgtacttttctgacagatttagcccgcaagaaagggttccgcgtcgagaatgaactgaccgacgaagttacccacatcgtggcagaaaatctgtcacgctctgaagtattggcttggctgaaagaacacaagatggagaagaccaagcaattcgaactgctggatattagctggcttatcgaaagcatgaaagttggtaaaccggtggacaccaaggggaaataccagttggcggaatcggttgaggtgagtgcgaacccagatccgacagaaggtcgtgtaaacgagctgcctcctactatgaaaaccgtttctccgtatgcgtgtcaacgccgcaccaccctgaacaaccgtaatcaacgttttacggactcgctggagattcttcgcgagaattacgtgtttaaaggcaacgacgatactgcgctggaatttcgtcgtgctatctccgtgctgaaaagccttccgtttgaggtacgtagcctgaaagacacggaaggattgccctggatcagtgatgaagtcaaagggattatggaagaaatcatcgaagtcggggagtcgcgtgaagtgcaggccgtgctcaatgatgagtggtatcaaagcttccacgcatttacgcgtgtctttggagtgggggtgaagacagcagacaagtggtaccgcatgggtctgcgcaccctggaggatgttcgttccagcaagaccctgaagttgaccacgtgggcgaaagtaggtctgacgtattatgaagatcttgctcgcggcgttacccgtgcggaagctgacgcgatttggctgctggttcaggatgcagtcgcaactttcgacccggatgcgatcgtggagattgtcggtggacagcgtcgtgggaaacctcagtctcacgacgttgatctgcttatcagttctccgggagctgaaaaagagcaagaagaccaactcctgcagaaagtgatgaatctgtggaagaaacaagggttgttgctgtgtggtcgtctggaatggagtcagtgggaatgggggggtctgccgacgggtaaggctgatgagggtgacggggaggcatcgtgctttctgatcctcaaactttatgatcatctggtgcgtaaaagtaaacgcaatatgccgactggttcgaacatgggcgagtccaaaccgtggaaagcaattaaagtagatctgctgcgttgcccccgcggcagttttgcgtttgcgatgttgcagtggaccggaagccgcatgttccgtcgtgatctgcgcgattacgcccgcgaagagaagaacatgatgctggacaatcatagcctgtatgacatgactcgtggtatccaactccctgctaaatcggaagaggaaattttcgaacatctggggcttgaatacctggaaccgttcgaacgtaacgca

SEQ ID NO: 5154 - protein, 529 aa, synthetic construct
  REGION 1..529: note = Variant of terminal deoxynucleotidyltransferase
MHHHHHHGGSGSHGIRTIDSDFGKKQQKKGDNHDSSATYEIKFHEFVLFILEEKMGATRRTFLTDLARKKGFRVENELTDEVTHIVAENLSRSEVLAWLKEHKMEKTKQFELLDISWLIESMKVGKPVDTKGKYQLAESVEVSANPDPTEGRVNELPPTMKTVSPYACQRRTTLNNRNQRFTDSLEILRENYVFKGNDDTALEFRRAISVLKSLPFEVRSLKDTEGLPWISDEVKGIMEEIIEVGESREVQAVLNDEWYQSFHAFTRVFGVGVKTADKWYRMGLRTLEDVRSSKTLKLTTWAKVGLTYYEDLARGVTRAEADAIWLLVQDAVATFDPDAIVEIVGGQRRGKPQSHDVDLLISSPGAEKEQEDQLLQKVMNLWKKQGLLLCGRLEWSQWEWGGLPTGKADEGDGEASCFLILKLYDHLVRKSKRNMPTGSNMGESKPWKAIKVDLLRCPRGSFAFAMLQWTGSRMFRRDLRDYAREEKNMMLDNHSLYDMTRGIQLPAKSEEEIFEHLGLEYLEPFERNA

SEQ ID NO: 5155 - DNA, 1587 bp, synthetic construct
  misc_feature 1..1587: note = Variant of terminal deoxynucleotidyltransferase
  source 1..1587: mol_type = other DNA
atgcaccatcatcatcatcatggcggtagcggcagccacggcattcgtaccatcgattcggacttcgggaagaaacagcagaaaaaaggcgataaccacgatagttccgccacttatgaaatcaaatttcacgagtttgtgctgttcattctcgaagaaaaaatgggtgcgacgcgtcgtacttttctgacagatttagcccgcaagaaagggttccgcgtcgagaatgaactgaccgacgaagttacccacatcgtggcagaaaatctgtcacgctctgaagtattggcttggctgaaagaacacaagatggagaagaccaagcaattcgaactgctggatattagctggcttatcgaaagcatgaaagttggtaaaccggtggacaccaaggggaaataccagttggcggaatcggttgaggtgagtgcgaacccagatccgacagaaggtcgtgtaaacgagctgcctcctactatgaaaaccgtttctccgtatgcgtgtcaacgccgcaccaccctgaacaaccgtaatcaacgttttacggactcgctggagattcttcgcctgaattacgtgctgaaaggcaacgacgatactgcgctggaatttcgtcgtgctatctccgtgctgaaaagccttccgtttgaggtacgtagcctgaaagacacggaaggattgccctggatcagtgatgaagtcaaagggattatggaagaaatcatcgaagtcggggagtcgcgtgaagtgcaggccgtgctcaatgatgagtggtatcaaagcttccacgcatttacgcgtgtctttggagtgggggtgaagacagcagacaagtggtaccgcatgggtctgcgcaccctggaggatgttcgttccagcaagaccctgaagttgaccacgtgggcgaaagtaggtctgacgtattatgaagatcttgctcgcggcgttacccgtgcggaagctgacgcgatttggctgctggttcaggatgcagtcgcaactttcgacccggatgcgatcgtggagattgtcggtggacagcgtcgtgggaaacctcagtctcacgacgttgatctgcttatcagttctccgggagctgaaaaagagcaagaagaccaactcctgcagaaagtgatgaatctgtggaagaaacaagggttgttgctgtgtggtcgtctggaatggagtcagtgggaatgggggggtctgccgtccggtaaggctgatgagggtgacggggaggcatcgtgctttctgatcctcaaactttatgatcatctggtgcgtaaaagtaaacgcaatatgccgactggttcgaacatgggcgagtccaaaccgtggaaagcaattaaagtagatctgctgcgttgcccccgcggcagttttgcgtttgcgatgttgcagtggaccggaagccgcatgttccgtcgtgatctgcgcgattacgcccgcgaagagaagaacatgatgctggacaatcatagcctgtatgacatgactcgtggtatccaactccctgctaaatcggaagaggaaattttcgaacatctggggcttgaatacctggaaccgttcgaacgtaacgca

SEQ ID NO: 5156 - protein, 529 aa, synthetic construct
  REGION 1..529: note = Variant of terminal deoxynucleotidyltransferase
MHHHHHHGGSGSHGIRTIDSDFGKKQQKKGDNHDSSATYEIKFHEFVLFILEEKMGATRRTFLTDLARKKGFRVENELTDEVTHIVAENLSRSEVLAWLKEHKMEKTKQFELLDISWLIESMKVGKPVDTKGKYQLAESVEVSANPDPTEGRVNELPPTMKTVSPYACQRRTTLNNRNQRFTDSLEILRLNYVLKGNDDTALEFRRAISVLKSLPFEVRSLKDTEGLPWISDEVKGIMEEIIEVGESREVQAVLNDEWYQSFHAFTRVFGVGVKTADKWYRMGLRTLEDVRSSKTLKLTTWAKVGLTYYEDLARGVTRAEADAIWLLVQDAVATFDPDAIVEIVGGQRRGKPQSHDVDLLISSPGAEKEQEDQLLQKVMNLWKKQGLLLCGRLEWSQWEWGGLPSGKADEGDGEASCFLILKLYDHLVRKSKRNMPTGSNMGESKPWKAIKVDLLRCPRGSFAFAMLQWTGSRMFRRDLRDYAREEKNMMLDNHSLYDMTRGIQLPAKSEEEIFEHLGLEYLEPFERNA

SEQ ID NO: 5157 - DNA, 1587 bp, synthetic construct
  misc_feature 1..1587: note = Variant of terminal deoxynucleotidyltransferase
  source 1..1587: mol_type = other DNA
atgcaccatcatcatcatcatggcggtagcggcagccacggcattcgtaccatcgattcggacttcgggaagaaacagcagaaaaaaggcgataaccacgatagttccgccacttatgaaatcaaatttcacgagtttgtgctgttcattctcgaagaaaaaatgggtgcgacgcgtcgtacttttctgacagatttagcccgcaagaaagggttccgcgtcgagaatgaactgaccgacgaagttacccacatcgtggcagaaaatctgtcacgctctgaagtattggcttggctgaaagaacacaagatggagaagaccaagcaattcgaactgctggatattagctggcttatcgaaagcatgaaagttggtaaaccggtggacaccaaggggaaataccagttggcggaatcggttgaggtgagtgcgaacccagatccgacagaaggtcgtgtaaacgagctgcctcctactatgaaaaccgtttctccgtatgcgtgtcaacgccgcaccaccctgaacaaccgtaatcaacgttttacggactcgctggagattcttcgcgagaattacgtgtttaaaggcaacgacgatactgcgctggaatttcgtcgtgctatctccgtgctgaaaagccttccgtttgaggtacgtagcctgaaagacacggaaggattgccctggatcagtgatgaagtcaaagggattatggaagaaatcatcgaagtcggggagtcgcgtgaagtgcaggccgtgctcaatgatgagtggtatcaaagcttccacgcatttacgcgtgtctttggagtgggggtgaagacagcagacaagtggtaccgcatgggtctgcgcaccctggaggatgttcgttccagcaagaccctgaagttgaccacgtgggcgaaagtaggtctgacgtattatgaagatcttgctcgcggcgttacccgtgcggaagctgacgcgatttggctgctggttcaggatgcagtcgcaactttcgacccggatgcgatcgtggagattgtcggtggacagcgtcgtgggaaacctcagtctcacgacgttgatctgcttatcagttctccgggagctgaaaaagagcaagaagaccaactcctgcagaaagtgatgaatctgtggaagaaacaagggttgttgctgtgtggtcgtctggaatggagtcagtgggaatgggggggtctgccgtccggtaaggctgatgagggtgacggggaggcatcgtgctttctgatcctcaaactttatgatcatctggtgcgtaaaagtaaacgcaatatgccgactggttcgaacatgggcgagtccaaaccgtggaaagcaattaaagtagatctgctgcgttgcccccgcggcagttttccttttgcgatgttgcagtggaccggaagccgcatgttccgtcgtgatctgcgcgattacgcccgcgaagagaagaacatgatgctggacaatcatagcctgtatgacatgactcgtggtatccaactccctgctaaatcggaagaggaaattttcgaacatctggggcttgaatacctggaaccgttcgaacgtaacgca

SEQ ID NO: 5158 - protein, 529 aa, synthetic construct
  REGION 1..529: note = Variant of terminal deoxynucleotidyltransferase
MHHHHHHGGSGSHGIRTIDSDFGKKQQKKGDNHDSSATYEIKFHEFVLFILEEKMGATRRTFLTDLARKKGFRVENELTDEVTHIVAENLSRSEVLAWLKEHKMEKTKQFELLDISWLIESMKVGKPVDTKGKYQLAESVEVSANPDPTEGRVNELPPTMKTVSPYACQRRTTLNNRNQRFTDSLEILRENYVFKGNDDTALEFRRAISVLKSLPFEVRSLKDTEGLPWISDEVKGIMEEIIEVGESREVQAVLNDEWYQSFHAFTRVFGVGVKTADKWYRMGLRTLEDVRSSKTLKLTTWAKVGLTYYEDLARGVTRAEADAIWLLVQDAVATFDPDAIVEIVGGQRRGKPQSHDVDLLISSPGAEKEQEDQLLQKVMNLWKKQGLLLCGRLEWSQWEWGGLPSGKADEGDGEASCFLILKLYDHLVRKSKRNMPTGSNMGESKPWKAIKVDLLRCPRGSFPFAMLQWTGSRMFRRDLRDYAREEKNMMLDNHSLYDMTRGIQLPAKSEEEIFEHLGLEYLEPFERNA

SEQ ID NO: 5159 - DNA, 1587 bp, synthetic construct
  misc_feature 1..1587: note = Variant of terminal deoxynucleotidyltransferase
  source 1..1587: mol_type = other DNA
atgcaccatcatcatcatcatggcggtagcggcagccacggcattcgtaccatcgattcggacttcgggaagaaacagcagaaaaaaggcgataaccacgatagttccgccacttatgaaatcaaatttcacgagtttgtgctgttcattctcgaagaaaaaatgggtgcgacgcgtcgtacttttctgacagatttagcccgcaagaaagggttccgcgtcgagaatgaactgaccgacgaagttacccacatcgtggcagaaaatctgtcacgctctgaagtattggcttggctgaaagaacacaagatggagaagaccaagcaattcgaactgctggatattagctggcttatcgaaagcatgaaagttggtaaaccggtggacaccaaggggaaataccagttggcggaatcggttgaggtgagtgcgaacccagatccgacagaaggtcgtgtaaacgagctgcctcctactatgaaaaccgtttctccgtatgcgtgtcaacgccgcaccaccctgaacaaccgtaatcaacgttttacggactcgctggagattcttcgcgaaaattacgtgtataaaggcaacgacgatactgcgctggaatttcgtcgtgctatctccgtgctgaaaagccttccgtttgaggtacgtagcctgaaagacacggaaggattgccctggatcagtgatgaagtcaaagggattatggaagaaatcatcgaagtcggggagtcgcgtgaagtgcaggccgtgctcaatgatgagtggtatcaaagcttccacgcatttacgcgtgtctttggagtgggggtgaagacagcagacaagtggtaccgcatgggtctgcgcaccctggaggatgttcgttccagcaagaccctgaagttgaccacgtgggcgaaagtaggtctgacgtattatgaagatcttgctcgcggcgttacccgtgcggaagctgacgcgatttggctgctggttcaggatgcagtcgcaactttcgacccggatgcgatcgtggagattgtcggtggacagcgtcgtgggaaacctcagtctcacgacgttgatctgcttatcagttctccgggagctgaaaaagagcaagaagaccaactcctgcagaaagtgatgaatctgtggaagaaacaagggttgttgctgtgtggtcgtctggaatggagtcagtgggaatgggggggtctgccgtccggtaaggctgatgagggtgacggggaggcatcgtgctttctgatcctcaaactttatgatcatctggtgcgtaaaagtaaacgcaatatgccgactggttcgaacatgggcgagtccaaaccgtggaaagcaattaaagtagatctgctgcgttgcccccgcggcagttttgcgtttgcgatgttgcagtggaccggaagccgcatgttccgtcgtgatctgcgcgattacgcccgcgaagagaagaacatgatgctggacaatcatagcctgtatgacatgactcgtggtatccaactccctgctaaatcggaagaggaaattttcgaacatctggggcttgaatacctggaaccgttcgaacgtaacgca

SEQ ID NO: 5160 - protein, 529 aa, synthetic construct
  REGION 1..529: note = Variant of terminal deoxynucleotidyltransferase
MHHHHHHGGSGSHGIRTIDSDFGKKQQKKGDNHDSSATYEIKFHEFVLFILEEKMGATRRTFLTDLARKKGFRVENELTDEVTHIVAENLSRSEVLAWLKEHKMEKTKQFELLDISWLIESMKVGKPVDTKGKYQLAESVEVSANPDPTEGRVNELPPTMKTVSPYACQRRTTLNNRNQRFTDSLEILRENYVYKGNDDTALEFRRAISVLKSLPFEVRSLKDTEGLPWISDEVKGIMEEIIEVGESREVQAVLNDEWYQSFHAFTRVFGVGVKTADKWYRMGLRTLEDVRSSKTLKLTTWAKVGLTYYEDLARGVTRAEADAIWLLVQDAVATFDPDAIVEIVGGQRRGKPQSHDVDLLISSPGAEKEQEDQLLQKVMNLWKKQGLLLCGRLEWSQWEWGGLPSGKADEGDGEASCFLILKLYDHLVRKSKRNMPTGSNMGESKPWKAIKVDLLRCPRGSFAFAMLQWTGSRMFRRDLRDYAREEKNMMLDNHSLYDMTRGIQLPAKSEEEIFEHLGLEYLEPFERNA

SEQ ID NO: 5161 - DNA, 1587 bp, synthetic construct
  misc_feature 1..1587: note = Variant of terminal deoxynucleotidyltransferase
  source 1..1587: mol_type = other DNA
atgcaccatcatcatcatcatggcggtagcggcagccacggcattcgtaccatcgattcggacttcgggaagaaacagcagaaaaaaggcgataaccacgatagttccgccacttatgaaatcaaatttcacgagtttgtgctgttcattctcgaagaaaaaatgggtgcgacgcgtcgtacttttctgacagatttagcccgcaagaaagggttccgcgtcgagaatgaactgaccgacgaagttacccacatcgtggcagaaaatctgtcacgctctgaagtattggcttggctgaaagaacacaagatggagaagaccaagcaattcgaactgctggatattagctggcttatcgaaagcatgaaagttggtaaaccggtggacaccaaggggaaataccagttggcggaatcggttgaggtgagtgcgaacccagatccgacagaaggtcgtgtaaacgagctgcctcctactatgaaaaccgtttctccgtatgcgtgtcaacgccgcaccaccctgaacaaccgtaatcaacgttttacggactcgctggagattcttcgcgagaattacgtgtttaaaggcaacgacgatactgcgctggaatttcgtcgtgctatctccgtgctgaaaagccttccgtttgaggtacgtagcctgaaagacacggaaggattgccctggatcagtgatgaagtcaaagggattatggaagaaatcatcgaagtcggggagtcgcgtgaagtgcaggccgtgctcaatgatgagtggtatcaaagcttccacgcatttacgcgtgtctttggagtgggggtgaagacagcagacaagtggtaccgcatgggtctgcgcaccctggaggatgttcgttccagcaagaccctgaagttgaccacgtgggcgaaagtaggtctgacgtattatgaagatcttgctcgcggcgttacccgtgcggaagctgacgcgatttggctgctggttcaggatgcagtcgcaactttcgacccggatgcgatcgtggagattgtcggtggacagcgtcgtgggaaacctcagtctcacgacgttgatctgcttatcagttctccgggagctgaaaaagagcaagaagaccaactcctgcagaaagtgatgaatctgtggaagaaacaagggttgttgctgtgtggtcgtctggaatggagtcagtgggaatgggggggtctgccgtccggtaaggctgatgagggtgacgcggaggcatcgtgctttctgatcctcaaactttatgatcatctggtgcgtaaaagtaaacgcaatatgccgactggttcgaacatgggcgagtccaaaccgtggaaagcaattaaagtagatctgctgcgttgcccccgcggcagttttgcgtttgcgatgttgcagtggaccggaagccgcatgttccgtcgtgatctgcgcgattacgcccgcgaagagaagaacatgatgctggacaatcatagcctgtatgacatgactcgtggtatccaactccctgctaaatcggaagaggaaattttcgaacatctggggcttgaatacctggaaccgttcgaacgtaacgca

SEQ ID NO: 5162 - protein, 529 aa, synthetic construct
  REGION 1..529: note = Variant of terminal deoxynucleotidyltransferase
MHHHHHHGGSGSHGIRTIDSDFGKKQQKKGDNHDSSATYEIKFHEFVLFILEEKMGATRRTFLTDLARKKGFRVENELTDEVTHIVAENLSRSEVLAWLKEHKMEKTKQFELLDISWLIESMKVGKPVDTKGKYQLAESVEVSANPDPTEGRVNELPPTMKTVSPYACQRRTTLNNRNQRFTDSLEILRENYVFKGNDDTALEFRRAISVLKSLPFEVRSLKDTEGLPWISDEVKGIMEEIIEVGESREVQAVLNDEWYQSFHAFTRVFGVGVKTADKWYRMGLRTLEDVRSSKTLKLTTWAKVGLTYYEDLARGVTRAEADAIWLLVQDAVATFDPDAIVEIVGGQRRGKPQSHDVDLLISSPGAEKEQEDQLLQKVMNLWKKQGLLLCGRLEWSQWEWGGLPSGKADEGDAEASCFLILKLYDHLVRKSKRNMPTGSNMGESKPWKAIKVDLLRCPRGSFAFAMLQWTGSRMFRRDLRDYAREEKNMMLDNHSLYDMTRGIQLPAKSEEEIFEHLGLEYLEPFERNA

SEQ ID NO: 5163 - DNA, 1587 bp, synthetic construct
  misc_feature 1..1587: note = Variant of terminal deoxynucleotidyltransferase
  source 1..1587: mol_type = other DNA
atgcaccatcatcatcatcatggcggtagcggcagccacggcattcgtaccatcgattcggacttcgggaagaaacagcagaaaaaaggcgataaccacgatagttccgccacttatgaaatcaaatttcacgagtttgtgctgttcattctcgaagaaaaaatgggtgcgacgcgtcgtacttttctgacagatttagcccgcaagaaagggttccgcgtcgagaatgaactgaccgacgaagttacccacatcgtggcagaaaatctgtcacgctctgaagtattggcttggctgaaagaacacaagatggagaagaccaagcaattcgaactgctggatattagctggcttatcgaaagcatgaaagttggtaaaccggtggacaccaaggggaaataccagttggcggaatcggttgaggtgagtgcgaacccagatccgacagaaggtcgtgtaaacgagctgcctcctactatgaaaaccgtttctccgtatgcgtgtcaacgccgcaccaccctgaacaaccgtaatcaacgttttacggactcgctggagattcttcgcgagaattacgtgtttaaaggcaacgacgatactgcgctggaatttcgtcgtgctatctccgtgctgaaaagccttccgtttgaggtacgtagcctgaaagacacggaaggattgccctggatcagtgatgaagtcaaagggattatggaagaaatcatcgaagtcggggagtcgcgtgaagtgcaggccgtgctcaatgatgagtggtatcaaagcttccacgcatttacgcgtgtctttggagtgggggtgaagacagcagacaagtggtaccgcatgggtctgcgcaccctggaggatgttcgttccagcaagaccctgaagttgaccccgtggcaggttgtaggtctgacgtattatgaagatcttgctcgcggcgttacccgtgcggaagctgacgcgatttggctgctggttcaggatgcagtcgcaactttcgacccggatgcgatcgtggagattgtcggtggacagcgtcgtgggaaacctcagtctcacgacgttgatctgcttatcagttctccgggagctgaaaaagagcaagaagaccaactcctgcagaaagtgatgaatctgtggaagaaacaagggttgttgctgtgtggtcgtctggaatggagtcagtgggaatgggggggtctgccgtccggtaaggctgatgagggtgacggggaggcatcgtgctttctgatcctcaaactttatgatcatctggtgcgtaaaagtaaacgcaatatgccgactggttcgaacatgggcgagtccaaaccgtggaaagcaattaaagtagatctgctgcgttgcccccgcggcagttttgcgtttgcgatgttgcagtggaccggaagccgcatgttccgtcgtgatctgcgcgattacgcccgcgaagagaagaacatgatgctggacaatcatagcctgtatgacatgactcgtggtatccaactccctgctaaatcggaagaggaaattttcgaacatctggggcttgaatacctggaaccgttcgaacgtaacgca

SEQ ID NO: 5164 - protein, 529 aa, synthetic construct
  REGION 1..529: note = Variant of terminal deoxynucleotidyltransferase
MHHHHHHGGSGSHGIRTIDSDFGKKQQKKGDNHDSSATYEIKFHEFVLFILEEKMGATRRTFLTDLARKKGFRVENELTDEVTHIVAENLSRSEVLAWLKEHKMEKTKQFELLDISWLIESMKVGKPVDTKGKYQLAESVEVSANPDPTEGRVNELPPTMKTVSPYACQRRTTLNNRNQRFTDSLEILRENYVFKGNDDTALEFRRAISVLKSLPFEVRSLKDTEGLPWISDEVKGIMEEIIEVGESREVQAVLNDEWYQSFHAFTRVFGVGVKTADKWYRMGLRTLEDVRSSKTLKLTPWQVVGLTYYEDLARGVTRAEADAIWLLVQDAVATFDPDAIVEIVGGQRRGKPQSHDVDLLISSPGAEKEQEDQLLQKVMNLWKKQGLLLCGRLEWSQWEWGGLPSGKADEGDGEASCFLILKLYDHLVRKSKRNMPTGSNMGESKPWKAIKVDLLRCPRGSFAFAMLQWTGSRMFRRDLRDYAREEKNMMLDNHSLYDMTRGIQLPAKSEEEIFEHLGLEYLEPFERNA

SEQ ID NO: 5165 - DNA, 1587 bp, synthetic construct
  misc_feature 1..1587: note = Variant of terminal deoxynucleotidyltransferase
  source 1..1587: mol_type = other DNA
atgcaccatcatcatcatcatggcggtagcggcagccacggcattcgtaccatcgattcggacttcgggaagaaacagcagaaaaaaggcgataaccacgatagttccgccacttatgaaatcaaatttcacgagtttgtgctgttcattctcgaagaaaaaatgggtgcgacgcgtcgtacttttctgacagatttagcccgcaagaaagggttccgcgtcgagaatgaactgaccgacgaagttacccacatcgtggcagaaaatctgtcacgctctgaagtattggcttggctgaaagaacacaagatggagaagaccaagcaattcgaactgctggatattagctggcttatcgaaagcatgaaagttggtaaaccggtggacaccaaggggaaataccagttggcggaatcggttgaggtgagtgcgaacccagatccgacagaaggtcgtgtaaacgagctgcctcctactatgaaaaccgtttctccgtatgcgtgtcaacgccgcaccaccctgaacaaccgtaatcaacgttttacggactcgctggagattcttcgcgagaattacgtgtttaaaggcaacgacgatactgcgctggaatttcgtcgtgctatctccgtgctgaaaagccttccgtttgaggtacgtagcctgaaagacacggaaggattgccctggatcagtgatgaagtcaaagggattatggaagaaatcatcgaagtcggggagtcgcgtgaagtgcaggccgtgctcaatgatgagtggtatcaaagcttccacgcatttacgcgtgtctttggagtgggggtgaagacagcagacaagtggtaccgcatgggtctgcgcaccctggaggatgttcgttccagcaagaccctgaagttgaccacgtgggcgaaagtaggtctgacgtattatgaagatcttgctcgcggcgttacccgtgcggaagctgacgcgatttggctgctggttcaggatgcagtcgcaactttcgacccggatgcgatcgtggagattgtcggtggacagcgtcgtgggaaacctcagtctcacgacgttgatctgcttatcagttctccgggagctgaaaaagagcaagaagaccaactcctgcagaaagtgatgaatctgtggaagaaacaagggttgttgctgtgtggtcgtctggaatggagtcagtgggaatgggggggtctgccgtccggtaaggctgatgagggtgacggggaggcatcgtgctttctgatcctcaaactttatgatcatctggtgcgtaaaagtaaacgcaatatgccgactggttcgaacatgggcgagtccaaaccgtggaaagcaattaaagtagatctgctgcgttgcccccgcggcagttttgcgtttgcgatgttgcagtggaccggaagccgcatgttccgtcgtgatctgcgcgattacgcccgcgaagagaagaacatgatgctgcgtaatcattcgctgtatgacatgactcgtggtatccaactccctgctaaatcggaagaggaaattttcgaacatctggggcttgaatacctggaaccgttcgaacgtaacgca

SEQ ID NO: 5166 - protein, 529 aa, synthetic construct
  REGION 1..529: note = Variant of terminal deoxynucleotidyltransferase
MHHHHHHGGSGSHGIRTIDSDFGKKQQKKGDNHDSSATYEIKFHEFVLFILEEKMGATRRTFLTDLARKKGFRVENELTDEVTHIVAENLSRSEVLAWLKEHKMEKTKQFELLDISWLIESMKVGKPVDTKGKYQLAESVEVSANPDPTEGRVNELPPTMKTVSPYACQRRTTLNNRNQRFTDSLEILRENYVFKGNDDTALEFRRAISVLKSLPFEVRSLKDTEGLPWISDEVKGIMEEIIEVGESREVQAVLNDEWYQSFHAFTRVFGVGVKTADKWYRMGLRTLEDVRSSKTLKLTTWAKVGLTYYEDLARGVTRAEADAIWLLVQDAVATFDPDAIVEIVGGQRRGKPQSHDVDLLISSPGAEKEQEDQLLQKVMNLWKKQGLLLCGRLEWSQWEWGGLPSGKADEGDGEASCFLILKLYDHLVRKSKRNMPTGSNMGESKPWKAIKVDLLRCPRGSFAFAMLQWTGSRMFRRDLRDYAREEKNMMLRNHSLYDMTRGIQLPAKSEEEIFEHLGLEYLEPFERNA

SEQ ID NO: 5167 - DNA, 1587 bp, synthetic construct
  misc_feature 1..1587: note = Variant of terminal deoxynucleotidyltransferase
  source 1..1587: mol_type = other DNA
atgcaccatcatcatcatcatggcggtagcgacagccacggcattcgtaccatcgattcggacttcgggaagaaacagcagaaaaaaggcgataaccacgatagttccgccacttatgaaatcaaatttcacgagtttgtgctgttcattctcgaagaaaaaatgggtgcgacgcgtcgtacttttctgacagatttagcccgcaagaaagggttccgcgtcgagaatgaactgaccgacgaagttacccacatcgtggcagaaaatctgtcacgctctgaagtattggcttggctgaaagaacacaagatggagaagaccaagcaattcgaactgctggatattagctggcttatcgaaagcatgaaagttggtaaaccggtggacaccaaggggaaataccagttggcggaatcggttgaggtgagtgcgaacccagatccgacagaaggtcgtgtaaacgagctgcctcctactatgaaaaccgtttctccgtatgcgtgtcaacgccgcaccaccctgaacaaccgtaatcaacgttttacggactcgctggagattcttcgcgagaattacgtgtttaaaggcaacgacgatactgcgctggaatttcgtcgtgctatctccgtgctgaaaagccttccgtttgaggtacgtagcctgaaagacacggaaggattgccctggatcagtgatgaagtcaaagggattatggaagaaatcatcgaagtcggggagtcgcgtgaagtgcaggccgtgctcaatgatgagtggtatcaaagcttccacgcatttacgcgtgtctttggagtgggggtgaagacagcagacaagtggtaccgcatgggtctgcgcaccctggaggatgttcgttccagcaagaccctgaagttgaccacgtgggcgaaagtaggtctgacgtattatgaagatcttgctcgcggcgttacccgtgcggaagctgacgcgatttggctgctggttcaggatgcagtcgcaactttcgacccggatgcgatcgtggagattgtcggtggacagcgtcgtgggaaacctcagtctcacgacgttgatctgcttatcagttctccgggagctgaaaaagagcaagaagaccaactcctgcagaaagtgatgaatctgtggaagaaacaagggttgttgctgtgtggtcgtctggaatggagtcagtgggaatgggggggtctgccgtccggtaaggctgatgagggtgacggggaggcatcgtgctttctgatcctcaaactttatgatcatctggtgcgtaaaagtaaacgcaatatgccgactggttcgaacatgggcgagtccaaaccgtggaaagcaattaaagtagatctgctgcgttgcccccgcggcagttttgcgtttgcgatgttgcagtggaccggaagccgcatgttccgtcgtgatctgcgcgattacgcccgcgaagagaagaacatgatgctggacaatcatagcctgtatgacatgactcgtggtatccaactccctgctaaatcggaagaggaaattttcgaacatctggggcttgaatacctgaggccgttcgaacgtaacgca

SEQ ID NO: 5168 - protein, 529 aa, synthetic construct
  REGION 1..529: note = Variant of terminal deoxynucleotidyltransferase
MHHHHHHGGSDSHGIRTIDSDFGKKQQKKGDNHDSSATYEIKFHEFVLFILEEKMGATRRTFLTDLARKKGFRVENELTDEVTHIVAENLSRSEVLAWLKEHKMEKTKQFELLDISWLIESMKVGKPVDTKGKYQLAESVEVSANPDPTEGRVNELPPTMKTVSPYACQRRTTLNNRNQRFTDSLEILRENYVFKGNDDTALEFRRAISVLKSLPFEVRSLKDTEGLPWISDEVKGIMEEIIEVGESREVQAVLNDEWYQSFHAFTRVFGVGVKTADKWYRMGLRTLEDVRSSKTLKLTTWAKVGLTYYEDLARGVTRAEADAIWLLVQDAVATFDPDAIVEIVGGQRRGKPQSHDVDLLISSPGAEKEQEDQLLQKVMNLWKKQGLLLCGRLEWSQWEWGGLPSGKADEGDGEASCFLILKLYDHLVRKSKRNMPTGSNMGESKPWKAIKVDLLRCPRGSFAFAMLQWTGSRMFRRDLRDYAREEKNMMLDNHSLYDMTRGIQLPAKSEEEIFEHLGLEYLRPFERNA

SEQ ID NO: 5169 - DNA, 1587 bp, synthetic construct
  misc_feature 1..1587: note = Variant of terminal deoxynucleotidyltransferase
  source 1..1587: mol_type = other DNA
atgcaccatcatcatcatcatggcggtagcggcagccacggcattcgtaccatcgattcggacttcgggaagaaacagcagaaaaaaggcgataaccacgatagttccgccacttatgaaatcaaatttcacgagtttgtgctgttcattctcgaagaaaaaatgggtgcgacgcgtcgtacttttctgacagatttagcccgcaagaaagggttccgcgtcgagaatgaactgaccgacgaagttacccacatcgtggcagaaaatctgtcacgctctgaagtattggcttggctgaaagaacacaagatggagaagaccaagcaattcgaactgctggatattagctggcttatcgaaagcatgaaagttggtaaaccggtggacaccaaggggaaataccagttggcggaatcggttgaggtgagtgcgaacccagatccgacagaaggtcgtgtaaacgagctgcctcctactatgaaaaccgtttctccgtatgcgtgtcaacgccgcaccaccctgaacaaccgtaatcaacgttttacggactcgctggagattcttcgcgagaattacgtgtttaaaggcaacgacgatactgcgctggaatttcgtcgtgctatctccgtgctgaaaagccttccgtttgaggtacgtagcctgaaagacacggaaggattgccctggatcagtgatgaagtcaaagggattatggaagaaatcatcgaagtcggggagtcgcgtgaagtgcaggccgtgctcaatgatgagtggtatcaaagcttccacgcatttacgcgtgtctttggagtgggggtgaagacagcagacaagtggtaccgcatgggtctgcgcaccctggaggatgttcgttccagcaagaccctgaagttgaccacgtgggcgaaagtaggtctgacgtattatgaagatcttgctcgcggcgttacccgtgcggaagctgacgcgatttggctgctggttcaggatgcagtcgcaactttcgacccggatgcgatcgtggagattgtcggtggacagcgtcgtgggaaacctcagtctcacgacgttgatctgcttatcagttctccgggagctgaaaaagagcaagaagaccaactcctgcagaaagtgatgaatctgtggaagaaacaagggttgttgctgtgtggtcgtctggaatggagtcagtgggaatgggggggtctgccgtccggtaaggctgatgagggtgacggggaggcatcgtgctttctgatcctcaaactttatgatcatctggtgcgtaaaagtaaacgcaatatgccgactggttcgaacatgggcgagtccaaaccgtggaaagcaattaaagtagatctgctgcgttgcccccgcggcagttttgcgtttgcgatggctcagtggaccggaagccgcatgttccgtcgtgatctgcgcgattacgcccgcgaagagaagaacatgatgctggacaatcatagcctgtatgacatgactcgtggtatccaactccctgctaaatcggaagaggaaattttcgaacatctggggcttgaatacctggaaccgttcgaacgtaacgca

SEQ ID NO: 5170 - protein, 529 aa, synthetic construct
  REGION 1..529: note = Variant of terminal deoxynucleotidyltransferase
MHHHHHHGGSGSHGIRTIDSDFGKKQQKKGDNHDSSATYEIKFHEFVLFILEEKMGATRRTFLTDLARKKGFRVENELTDEVTHIVAENLSRSEVLAWLKEHKMEKTKQFELLDISWLIESMKVGKPVDTKGKYQLAESVEVSANPDPTEGRVNELPPTMKTVSPYACQRRTTLNNRNQRFTDSLEILRENYVFKGNDDTALEFRRAISVLKSLPFEVRSLKDTEGLPWISDEVKGIMEEIIEVGESREVQAVLNDEWYQSFHAFTRVFGVGVKTADKWYRMGLRTLEDVRSSKTLKLTTWAKVGLTYYEDLARGVTRAEADAIWLLVQDAVATFDPDAIVEIVGGQRRGKPQSHDVDLLISSPGAEKEQEDQLLQKVMNLWKKQGLLLCGRLEWSQWEWGGLPSGKADEGDGEASCFLILKLYDHLVRKSKRNMPTGSNMGESKPWKAIKVDLLRCPRGSFAFAMAQWTGSRMFRRDLRDYAREEKNMMLDNHSLYDMTRGIQLPAKSEEEIFEHLGLEYLEPFERNA

SEQ ID NO: 5171 - DNA, 1587 bp, synthetic construct
  misc_feature 1..1587: note = Variant of terminal deoxynucleotidyltransferase
  source 1..1587: mol_type = other DNA
atgcaccatcatcatcatcatggcggtagcggcagccacggcattcgtaccatcgattcggacttcgggaagaaacagcagaaaaaaggcgataaccacgatagttccgccacttatgaaatcaaatttcacgagtttgtgctgttcattctcgaagaaaaaatgggtgcgacgcgtcgtacttttctgacagatttagcccgcaagaaagggttccgcgtcgagaatgaactgaccgacgaagttacccacatcgtggcagaaaatctgtcacgctctgaagtattggcttggctgaaagaacacaagatggagaagaccaagcaattcgaactgctggatattagctggcttatcgaaagcatgaaagttggtaaaccggtggacaccaaggggaaataccagttggcggaatcggttgaggtgagtgcgaacccagatccgacagaaggtcgtgtaaacgagctgcctcctactatgaaaaccgtttctccgtatgcgtgtcaacgccgcaccaccctgaacaaccgtaatcaacgttttacggactcgctggagattcttcgcgagaattacgtgtttaaaggcaacgacgatactgcgctggaatttcgtcgtgctggttccgtgctgaaaagccttccgtttgaggtacgtagcctgaaagacacggaaggattgccctggatcagtgatgaagtcaaagggattatggaagaaatcatcgaagtcggggagtcgcgtgaagtgcaggccgtgctcaatgatgagtggtatcaaagcttccacgcatttacgcgtgtctttggagtgggggtgaagacagcagacaagtggtaccgcatgggtctgcgcaccctggaggatgttcgttccagcaagaccctgaagttgaccacgtgggcgaaagtaggtctgacgtattatgaagatcttgctcgcggcgttacccgtgcggaagctgacgcgatttggctgctggttcaggatgcagtcgcaactttcgacccggatgcgatcgtggagattgtcggtggacagcgtcgtgggaaacctcagtctcacgacgttgatctgcttatcagttctccgggagctgaaaaagagcaagaagaccaactcctgcagaaagtgatgaatctgtggaagaaacaagggttgttgctgtgtggtcgtctggaatggagtcagtgggaatgggggggtctgccgtccggtaaggctgatgagggtgacggggaggcatcgtgctttctgatcctcaaactttatgatcatctggtgcgtaaaagtaaacgcaatatgccgactggttcgaacatgggcgagtccaaaccgtggaaagcaattaaagtagatctgctgcgttgcccccgcggcagttttgcgtttgcgatgttgcagtggaccggaagccgcatgttccgtcgtgatctgcgcgattacgcccgcgaagagaagaacatgatgctggacaatcatagcctgtatgacatgactcgtggtatccaactccctgctaaatcggaagaggaaattttcgaacatctggggcttgaatacctggaaccgttcgaacgtaacgca

SEQ ID NO: 5172 - protein, 529 aa, synthetic construct
  REGION 1..529: note = Variant of terminal deoxynucleotidyltransferase
MHHHHHHGGSGSHGIRTIDSDFGKKQQKKGDNHDSSATYEIKFHEFVLFILEEKMGATRRTFLTDLARKKGFRVENELTDEVTHIVAENLSRSEVLAWLKEHKMEKTKQFELLDISWLIESMKVGKPVDTKGKYQLAESVEVSANPDPTEGRVNELPPTMKTVSPYACQRRTTLNNRNQRFTDSLEILRENYVFKGNDDTALEFRRAGSVLKSLPFEVRSLKDTEGLPWISDEVKGIMEEIIEVGESREVQAVLNDEWYQSFHAFTRVFGVGVKTADKWYRMGLRTLEDVRSSKTLKLTTWAKVGLTYYEDLARGVTRAEADAIWLLVQDAVATFDPDAIVEIVGGQRRGKPQSHDVDLLISSPGAEKEQEDQLLQKVMNLWKKQGLLLCGRLEWSQWEWGGLPSGKADEGDGEASCFLILKLYDHLVRKSKRNMPTGSNMGESKPWKAIKVDLLRCPRGSFAFAMLQWTGSRMFRRDLRDYAREEKNMMLDNHSLYDMTRGIQLPAKSEEEIFEHLGLEYLEPFERNA

SEQ ID NO: 5173 - DNA, 1587 bp, synthetic construct
  misc_feature 1..1587: note = Variant of terminal deoxynucleotidyltransferase
  source 1..1587: mol_type = other DNA
atgcaccatcatcatcatcatggcggtagcggcagccacggcattcgtaccatcgattcggacttcgggaagaaacagcagaaaaaaggcgataaccacgatagttccgccacttatgaaatcaaatttcacgagtttgtgctgttcattctcgaagaaaaaatgggtgcgacgcgtcgtacttttctgacagatttagcccgcaagaaagggttccgcgtcgagaatgaactgaccgacgaagttacccacatcgtggcagaaaatctgtcacgctctgaagtattggcttggctgaaagaacacaagatggagaagaccaagcaattcgaactgctggatattagctggcttatcgaaagcatgaaagttggtaaaccggtggacaccaaggggaaataccagttggcggaatcggttgaggtgagtgcgaacccagatccgacagaaggtcgtgtaaacgagctgcctcctactatgaaaaccgtttctccgtatgcgtgtcaacgccgcaccaccctgaacaaccgtaatcaacgttttacggactcgctggagattcttcgcgagaattacgtgtttaaaggcaacgacgatactgcgctggaatttcgtcgtgctatctccgtgctgaaaagccttccgtttgaggtacgtagcctgaaagacacggaaggattgccctggatcagtgatgaagtcaaagggattatggaagaaatcatcgaagtcggggagtcgcgtgaagtgcaggccgtgctcaatgatgagtggtatcaaagcttccactcgtttacgcgtgtctttggagtgggggtgaagacagcagacaagtggtaccgcatgggtctgcgcaccctggaggatgttcgttccagcaagaccctgaagttgaccacgtgggcgaaagtaggtctgacgtattatgaagatcttgctcgcggcgttacccgtgcggaagctgacgcgatttggctgctggttcaggatgcagtcgcaactttcgacccggatgcgatcgtggagattgtcggtggacagcgtcgtgggaaacctcagtctcacgacgttgatctgcttatcagttctccgggagctgaaaaagagcaagaagaccaactcctgcagaaagtgatgaatctgtggaagaaacaagggttgttgctgtgtggtcgtctggaatggagtcagtgggaatgggggggtctgccgtccggtaaggctgatgagggtgacggggaggcatcgtgctttctgatcctcaaactttatgatcatctggtgcgtaaaagtaaacgcaatatgccgactggttcgaacatgggcgagtccaaaccgtggaaagcaattaaagtagatctgctgcgttgcccccgcggcagttttgcgtttgcgatgttgcagtggaccggaagccgcatgttccgtcgtgatctgcgcgattacgcccgcgaagagaagaacatgatgctggacaatcatagcctgtatgacatgactcgtggtatccaactccctgctaaatcggaagaggaaattttcgaacatctggggcttgaatacctggaaccgttcgaacgtaacgca

SEQ ID NO: 5174 - protein, 529 aa, synthetic construct
  REGION 1..529: note = Variant of terminal deoxynucleotidyltransferase
MHHHHHHGGSGSHGIRTIDSDFGKKQQKKGDNHDSSATYEIKFHEFVLFILEEKMGATRRTFLTDLARKKGFRVENELTDEVTHIVAENLSRSEVLAWLKEHKMEKTKQFELLDISWLIESMKVGKPVDTKGKYQLAESVEVSANPDPTEGRVNELPPTMKTVSPYACQRRTTLNNRNQRFTDSLEILRENYVFKGNDDTALEFRRAISVLKSLPFEVRSLKDTEGLPWISDEVKGIMEEIIEVGESREVQAVLNDEWYQSFHSFTRVFGVGVKTADKWYRMGLRTLEDVRSSKTLKLTTWAKVGLTYYEDLARGVTRAEADAIWLLVQDAVATFDPDAIVEIVGGQRRGKPQSHDVDLLISSPGAEKEQEDQLLQKVMNLWKKQGLLLCGRLEWSQWEWGGLPSGKADEGDGEASCFLILKLYDHLVRKSKRNMPTGSNMGESKPWKAIKVDLLRCPRGSFAFAMLQWTGSRMFRRDLRDYAREEKNMMLDNHSLYDMTRGIQLPAKSEEEIFEHLGLEYLEPFERNA

SEQ ID NO: 5175 - DNA, 1587 bp, synthetic construct
  misc_feature 1..1587: note = Variant of terminal deoxynucleotidyltransferase
  source 1..1587: mol_type = other DNA
atgcaccatcatcatcatcatggcggtagcggcagccacggcattcgtaccatcgattcggacttcgggaagaaacagcagaaaaaaggcgataaccacgatagttccgccacttatgaaatcaaatttcacgagtttgtgctgttcattctcgaagaaaaaatgggtgcgacgcgtcgtacttttctgacagatttagcccgcaagaaagggttccgcgtcgagaatgaactgaccgacgaagttacccacatcgtggcagaaaatctgtcacgctctgaagtattggcttggctgaaagaacacaagatggagaagaccaagcaattcgaactgctggatattagctggcttatcgaaagcatgaaagttggtaaaccggtggacaccaaggggaaataccagttggcggaatcggttgaggtgagtgcgaacccagatccgacagaaggtcgtgtaaacgagctgcctcctactatgaaaaccgtttctccgtatgcgtgtcaacgccgcaccaccctgaacaaccgtaatcaacgttttacggactcgctggagattcttcgcgagaattacgtgtttaaaggcaacgacgatactgcgctggaatttcgtcgtgctatctccgtgctgaaaagccttccgtttgaggtacgtagcctgaaagacacggaaggattgccctggatcagtgatgaagtcaaagggattatggaagaaatcatcgaagtcggggagtcgcgtgaagtgcaggccgtgctcaatgatgagtggtatcaaagcttccacgcatttacgcgtgtctttggagtgggggtatggacagcagacaagtggtaccgcatgggtctgcgcaccctggaggatgttcgttccagcaagaccctgaagttgaccacgtgggcgaaagtaggtctgacgtattatgaagatcttgctcgcggcgttacccgtgcggaagctgacgcgatttggctgctggttcaggatgcagtcgcaactttcgacccggatgcgatcgtggagattgtcggtggacagcgtcgtgggaaacctcagtctcacgacgttgatctgcttatcagttctccgggagctgaaaaagagcaagaagaccaactcctgcagaaagtgatgaatctgtggaagaaacaagggttgttgctgtgtggtaaagtggtgtggagtcagtgggaatgggggggtctgccgtccggtaaggctgatgagggtgacggggaggcatcgtgctttctgatcctcaaactttatgatcatctggtgcgtaaaagtaaacataatatgccgactggttcgaacatgggcgagtccaaaccgtggaaagcaattaaagtagatctgctgcgttgcccccgcggcagttttgcgtttgcgatgttgcagtggaccggaagccgcatgttccgtcgcgatctgcgcgattacgcccgcgaagagaagaacatgatgctggacaatcatagcctgtatgacatgactcgtggtatccaactccctgctaaatcggaagaggaaattttcgaacatctggggcttgaatacctggaaccgttcgaacgtaacgca

SEQ ID NO: 5176 - protein, 529 aa, synthetic construct
  REGION 1..529: note = Variant of terminal deoxynucleotidyltransferase
MHHHHHHGGSGSHGIRTIDSDFGKKQQKKGDNHDSSATYEIKFHEFVLFILEEKMGATRRTFLTDLARKKGFRVENELTDEVTHIVAENLSRSEVLAWLKEHKMEKTKQFELLDISWLIESMKVGKPVDTKGKYQLAESVEVSANPDPTEGRVNELPPTMKTVSPYACQRRTTLNNRNQRFTDSLEILRENYVFKGNDDTALEFRRAISVLKSLPFEVRSLKDTEGLPWISDEVKGIMEEIIEVGESREVQAVLNDEWYQSFHAFTRVFGVGVWTADKWYRMGLRTLEDVRSSKTLKLTTWAKVGLTYYEDLARGVTRAEADAIWLLVQDAVATFDPDAIVEIVGGQRRGKPQSHDVDLLISSPGAEKEQEDQLLQKVMNLWKKQGLLLCGKVVWSQWEWGGLPSGKADEGDGEASCFLILKLYDHLVRKSKHNMPTGSNMGESKPWKAIKVDLLRCPRGSFAFAMLQWTGSRMFRRDLRDYAREEKNMMLDNHSLYDMTRGIQLPAKSEEEIFEHLGLEYLEPFERNA

SEQ ID NO: 5177 - DNA, 1587 bp, synthetic construct
  misc_feature 1..1587: note = Variant of terminal deoxynucleotidyltransferase
  source 1..1587: mol_type = other DNA
atgcaccatcatcatcatcatggcggtagcggcagccacggcattcgtaccatcgattcggacttcgggaagaaacagcagaaaaaaggcgataaccacgatagttccgccacttatgaaatcaaatttcacgagtttgtgctgttcattctcgaagaaaaaatgggtgcgacgcgtcgtacttttctgacagatttagcccgcaagaaagggttccgcgtcgagaatgaactgaccgacgaagttacccacatcgtggcagaaaatctgtcacgctctgaagtattggcttggctgaaagaacacaagatggagaagaccaagcaattcgaactgctggatattagctggcttatcgaaagcatgaaagttggtaaaccggtggacaccaaggggaaataccagttggcggaatcggttgaggtgagtgcgaacccagatccgacagaaggtcgtgtaaacgagctgcctcctactatgaaaaccgtttctccgtatgcgtgtcaacgccgcaccaccctgaacaaccgtaatcaacgttttacggactcgctggagattcttcgcgagaattacgtgctgaaaggcaacgatgatactgcgctggaatttcgtcgtgctgtgtccgtgctgaaaagccttccgtttgaggtacgtagcctgaaagacacggaaggattgccctggatcagtgatgaagtcaaagggattatggaagaaatcatcgaagtcggggagtcgcgtgaagtgcaggccgtgctcaatgatgagtggtatcaaagcttccacgcatttacgcgtgtctttggagtgggggtgaagacagcagacaagtggtaccgcatgggtctgcgcaccctggaggatgttcgttccagcaagaccctgaagttgaccacgtgggcgaaagtaggtctgacgtattacgaagatcttgcgcgcggcgttacccgtgcggaagctgacgcgatttggctgctggttcaggatgcagtcgcaactttcgacccggatgcgatcgtggagattgtcggtggacagcgtcgtgggaaacctcagtctcacgacgttgatctgcttatcagttctccgggagctgaaaaagagcaagaagaccaactcctgcagaaagtgatgaatctgtggaagaaacaagggttgttgctgtgtggtaaagtggtgtggagtcagtgggaatgggggggtctgccgtccggtaaggctgatgagctggacggggaggcatcgtgctttctgatcctcaaactttatgatcatctggtgcgtaaaagtaaacataatatgccgactggttcgaacatgggcgagtccaaaccgtggaaagcaattaaagtagatctgctgcgttgcccccgcggcagttttgcgtttgcgatgttgcagtggaccggaagccgcatgttccgtcgcgatctgcgcgattacgcccgcgaagagaagaacatgatgctggacaatcatagcctgtatgacatgactcgtggtatccaactccctgctaaatcggaagaggaaattttcgaacatctggggcttgaatacctggaaccgttcgaacgtaacgca

SEQ ID NO: 5178 - protein, 529 aa, synthetic construct
  REGION 1..529: note = Variant of terminal deoxynucleotidyltransferase
MHHHHHHGGSGSHGIRTIDSDFGKKQQKKGDNHDSSATYEIKFHEFVLFILEEKMGATRRTFLTDLARKKGFRVENELTDEVTHIVAENLSRSEVLAWLKEHKMEKTKQFELLDISWLIESMKVGKPVDTKGKYQLAESVEVSANPDPTEGRVNELPPTMKTVSPYACQRRTTLNNRNQRFTDSLEILRENYVLKGNDDTALEFRRAVSVLKSLPFEVRSLKDTEGLPWISDEVKGIMEEIIEVGESREVQAVLNDEWYQSFHAFTRVFGVGVKTADKWYRMGLRTLEDVRSSKTLKLTTWAKVGLTYYEDLARGVTRAEADAIWLLVQDAVATFDPDAIVEIVGGQRRGKPQSHDVDLLISSPGAEKEQEDQLLQKVMNLWKKQGLLLCGKVVWSQWEWGGLPSGKADELDGEASCFLILKLYDHLVRKSKHNMPTGSNMGESKPWKAIKVDLLRCPRGSFAFAMLQWTGSRMFRRDLRDYAREEKNMMLDNHSLYDMTRGIQLPAKSEEEIFEHLGLEYLEPFERNA

SEQ ID NO: 5179 - DNA, 1587 bp, synthetic construct
  misc_feature 1..1587: note = Variant of terminal deoxynucleotidyltransferase
  source 1..1587: mol_type = other DNA
atgcaccatcatcatcatcatggcggtagcggcagccacggcattcgtaccatcgattcggacttcgggaagaaacagcagaaaaaaggcgataaccacgatagttccgccacttatgaaatcaaatttcacgagtttgtgctgttcattctcgaagaaaaaatgggtgcgacgcgtcgtacttttctgacagatttagcccgcaagaaagggttccgcgtcgagaatgaactgaccgacgaagttacccacatcgtggcagaaaatctgtcacgctctgaagtattggcttggctgaaagaacacaagatggagaagaccaagcaattcgaactgctggatattagctggcttatcgaaagcatgaaagttggtaaaccggtggacaccaaggggaaataccagttggcggaatcggttgaggtgagtgcgaacccagatccgacagaaggtcgtgtaaacgagctgcctcctactatgaaaaccgtttctccgtatgcgtgtcaacgccgcaccaccctgaacaaccgtaatcaacgttttacggactcgctggagattcttcgcgagaattacgtgctgaaaggcaacgatgatactgcgctggaatttcgtcgtgctatctccgtgctgaaaagccttccgtttgaggtacgtagcctgaaagacacggaaggattgccctggatcagtgatgaagtcaaagggattatggaagaaatcatcgaagtcggggagtcgcgtgaagtgcaggccgtgctcaatgatgagtggtatcaaagcttccacgcatttacgcgtgtctttggagtgggggtgaagacagcagacaagtggtaccgcatgggtctgcgcaccctggaggatgttcgttccagcaagaccctgaagttgaccacgtgggcgaaagtaggtctgacgtatcgtgaagatcttgcgcgcggcgttacccgtgcggaagctgacgcgatttggctgctggttcaggatgcagtcgcaactttcgacccggatgcgatcgtggagattgtcggtggacagcgtcgtgggaaacctcagtctcacgacgttgatctgcttatcagttctccgggagctgaaaaagagcaagaagaccaactcctgcagaaagtgatgaatctgtggaagaaacaagggttgttgctgtgtggtaaagtggtgtggagtcagtgggaatgggggggtctgccgtccggtaaggctgatgagggtgacggggaggcatcgtgctttctgatcctcaaactttatgatcatctggtgcgtaaaagtaaacataatatgccgactggttcgaacatgggcgagtccaaaccgtggaaagcaattaaagtagatctgctgcgttgcccccgcggcagttttgcgtttgcgatgttgcagtggaccggaagccgcatgttccgtcgcgatctgcgcgattacgcccgcgaagagaagaacatgatgctggacaatcatagcctgtatgacatgactcgtggtatccaactccctgctaaatcggaagaggaaattttcgaacatctggggcttgaatacctggaaccgttcgaacgtaacgca

SEQ ID NO: 5180 - protein, 529 aa, synthetic construct
  REGION 1..529: note = Variant of terminal deoxynucleotidyltransferase
MHHHHHHGGSGSHGIRTIDSDFGKKQQKKGDNHDSSATYEIKFHEFVLFILEEKMGATRRTFLTDLARKKGFRVENELTDEVTHIVAENLSRSEVLAWLKEHKMEKTKQFELLDISWLIESMKVGKPVDTKGKYQLAESVEVSANPDPTEGRVNELPPTMKTVSPYACQRRTTLNNRNQRFTDSLEILRENYVLKGNDDTALEFRRAISVLKSLPFEVRSLKDTEGLPWISDEVKGIMEEIIEVGESREVQAVLNDEWYQSFHAFTRVFGVGVKTADKWYRMGLRTLEDVRSSKTLKLTTWAKVGLTYREDLARGVTRAEADAIWLLVQDAVATFDPDAIVEIVGGQRRGKPQSHDVDLLISSPGAEKEQEDQLLQKVMNLWKKQGLLLCGKVVWSQWEWGGLPSGKADEGDGEASCFLILKLYDHLVRKSKHNMPTGSNMGESKPWKAIKVDLLRCPRGSFAFAMLQWTGSRMFRRDLRDYAREEKNMMLDNHSLYDMTRGIQLPAKSEEEIFEHLGLEYLEPFERNA

SEQ ID NO: 5181 - DNA, 1587 bp, synthetic construct
  misc_feature 1..1587: note = Variant of terminal deoxynucleotidyltransferase
  source 1..1587: mol_type = other DNA
atgcaccatcatcatcatcatggcggtagcggcagccacggcattcgtaccatcgattcggacttcgggaagaaacagcagaaaaaaggcgataaccacgatagttccgccacttatgaaatcaaatttcacgagtttgtgctgttcattctcgaagaaaaaatgggtgcgacgcgtcgtacttttctgacagatttagcccgcaagaaagggttccgcgtcgagaatgaactgaccgacgaagttacccacatcgtggcagaaaatctgtcacgctctgaagtattggcttggctgaaagaacacaagatggagaagaccaagcaattcgaactgctggatattagctggcttatcgaaagcatgaaagttggtaaaccggtggacaccaaggggaaataccagttggcggaatcggttgaggtgagtgcgaacccagatccgacagaaggtcgtgtaaacgagctgcctcctactatgaaaaccgtttctccgtatgcgtgtcaacgccgcaccaccctgaacaaccgtaatcaacgttttacggactcgctggagattcttcgcgagaattacgtgtttaaaggcaacgacgatactgcgctggaatttcgtcgtgctatctccgtgctgaaaagccttccgtttgaggtacgtagcctgaaagacacggaaggattgccctggatcagtgatgaagtcaaagggattatggaagaaatcatcgaagtcggggagtcgcgtgaagtgcaggccgtgctcaatgatgagtggtatcaaagcttccacgcatttacgcgtgtctttggagtggggagttggacagcagacaagtggtaccgcatgggtctgcgcaccctggaggatgttcgttccagcaagaccctgaagttgaccacgtgggcgaaagtaggtctgacgtattatgaagatcttgctcgcggcgttacccgtgcggaagctgacgcgatttggctgctggttcaggatgcagtcgcaactttcgacccggatgcgatcgtggagattgtcggtggacagcgtcgtgggaaacctcagtctcacgacgttgatctgcttatcagttctccgggagctgaaaaagagcaagaagaccaactcctgcagaaagtgatgaatctgtggaagaaacaagggttgttgctgtgtggtaaagtggtgtggagtcagtgggaatgggggggtctgccgtccggtaaggctgatgagggtgacggggaggcatcgtgctttctgatcctcaaactttatgatcatctggtgcgtaaaagtaaacataatatgccgactggttcgaacatgggcgagtccaaaccgtggaaagcaattaaagtagatctgctgcgttgcccccgcggcagttttgcgtttgcgatgttgcagtggaccggaagccgcatgttccgtcgcgatctgcgcgattacgcccgcgaagagaagaacatgatgctggacaatcatagcctgtatgacatgactcgtggtatccaactccctgctaaatcggaagaggaaattttcgaacatctggggcttgaatacctggaaccgttcgaacgtaacgca

SEQ ID NO: 5182 - protein, 529 aa, synthetic construct
  REGION 1..529: note = Variant of terminal deoxynucleotidyltransferase
MHHHHHHGGSGSHGIRTIDSDFGKKQQKKGDNHDSSATYEIKFHEFVLFILEEKMGATRRTFLTDLARKKGFRVENELTDEVTHIVAENLSRSEVLAWLKEHKMEKTKQFELLDISWLIESMKVGKPVDTKGKYQLAESVEVSANPDPTEGRVNELPPTMKTVSPYACQRRTTLNNRNQRFTDSLEILRENYVFKGNDDTALEFRRAISVLKSLPFEVRSLKDTEGLPWISDEVKGIMEEIIEVGESREVQAVLNDEWYQSFHAFTRVFGVGSWTADKWYRMGLRTLEDVRSSKTLKLTTWAKVGLTYYEDLARGVTRAEADAIWLLVQDAVATFDPDAIVEIVGGQRRGKPQSHDVDLLISSPGAEKEQEDQLLQKVMNLWKKQGLLLCGKVVWSQWEWGGLPSGKADEGDGEASCFLILKLYDHLVRKSKHNMPTGSNMGESKPWKAIKVDLLRCPRGSFAFAMLQWTGSRMFRRDLRDYAREEKNMMLDNHSLYDMTRGIQLPAKSEEEIFEHLGLEYLEPFERNA

SEQ ID NO: 5183 - DNA, 1587 bp, synthetic construct
  misc_feature 1..1587: note = Variant of terminal deoxynucleotidyltransferase
  source 1..1587: mol_type = other DNA
atgcaccatcatcatcatcatggcggtagcggcagccacggcattcgtaccatcgattcggacttcgggaagaaacagcagaaaaaaggcgataaccacgatagttccgccacttatgaaatcaaatttcacgagtttgtgctgttcattctcgaagaaaaaatgggtgcgacgcgtcgtacttttctgacagatttagcccgcaagaaagggttccgcgtcgagaatgaactgaccgacgaagttacccacatcgtggcagaaaatctgtcacgctctgaagtattggcttggctgaaagaacacaagatggagaagaccaagcaattcgaactgctggatattagctggcttatcgaaagcatgaaagttggtaaaccggtggacaccaaggggaaataccagttggcggaatcggttgaggtgagtgcgaacccagatccgacagaaggtcgtgtaaacgagctgcctcctactatgaaaaccgtttctccgtatgcgtgtcaacgccgcaccaccctgaacaaccgtaatcaacgttttacggactcgctggagattcttcgcgagaattacgtgctgaaaggcaacgtggatactgcgctggaatttcgtcgtgctatctccgtgctgaaaagccttccgtttgaggtacgtagcctgaaagacacggaaggattgccctggatcagtgatgaagtcaaagggattatggaagaaatcatcgaagtcggggagtcgcgtgaagtgcaggccgtgctcaatgatgagtggtatcaaagcttccacgcatttacgcgtgtctttggagtgggggtgaagacagcagacaagtggtaccgcatgggtctgcgcaccctggaggatgttcgttccagcaagaccctgaagttgaccacgtgggcgaaagtaggtctgacgtattatgaagatcttgcgcgcggcgttacccgtgcggaagctgacgcgatttggctgctggttcaggatgcagtcgcaactttcgacccggatgcgatcgtggagattgtcggtggacagcgtcgtgggaaacctcagtctcacgacgttgatctgcttatcagttctccgggagctgaaaaagagcaagaagaccaactcctgcagaaagtgatgaatctgtggaagaaacaagggttgttgctgtgtggtaaagtggtgtggagtcagtgggaatgggggggtctgccgtccggtaaggctgatgagggggacggggaggcatcgtgctttctgatcctcaaactttatgatcatctggtgcgtaaaagtaaacataatatgccgactggttcgaacatgggcgagtccaaaccgtggaaagcaattaaagtagatctgctgcgttgcccccgcggcagttttgcgtttgcgatgttgcagtggaccggaagccgcatgttccgtcgcgatctgcgcgattacgcccgcgaagagaagaacatgatgctggacaatcatagcctgtatgacatgactcgtggtatccaactccctgctaaatcggaagaggaaattttcgaacatctggggcttgaatacctggaaccgttcgaacgtaacgca

SEQ ID NO: 5184 - protein, 529 aa, synthetic construct
  REGION 1..529: note = Variant of terminal deoxynucleotidyltransferase
MHHHHHHGGSGSHGIRTIDSDFGKKQQKKGDNHDSSATYEIKFHEFVLFILEEKMGATRRTFLTDLARKKGFRVENELTDEVTHIVAENLSRSEVLAWLKEHKMEKTKQFELLDISWLIESMKVGKPVDTKGKYQLAESVEVSANPDPTEGRVNELPPTMKTVSPYACQRRTTLNNRNQRFTDSLEILRENYVLKGNVDTALEFRRAISVLKSLPFEVRSLKDTEGLPWISDEVKGIMEEIIEVGESREVQAVLNDEWYQSFHAFTRVFGVGVKTADKWYRMGLRTLEDVRSSKTLKLTTWAKVGLTYYEDLARGVTRAEADAIWLLVQDAVATFDPDAIVEIVGGQRRGKPQSHDVDLLISSPGAEKEQEDQLLQKVMNLWKKQGLLLCGKVVWSQWEWGGLPSGKADEGDGEASCFLILKLYDHLVRKSKHNMPTGSNMGESKPWKAIKVDLLRCPRGSFAFAMLQWTGSRMFRRDLRDYAREEKNMMLDNHSLYDMTRGIQLPAKSEEEIFEHLGLEYLEPFERNA

SEQ ID NO: 5185 - DNA, 1587 bp, synthetic construct
  misc_feature 1..1587: note = Variant of terminal deoxynucleotidyltransferase
  source 1..1587: mol_type = other DNA
atgcaccatcatcatcatcatggcggtagcggcagccacggcattcgtaccatcgattcggacttcgggaagaaacagcagaaaaaaggcgataaccacgatagttccgccacttatgaaatcaaatttcacgagtttgtgctgttcattctcgaagaaaaaatgggtgcgacgcgtcgtacttttctgacagatttagcccgcaagaaagggttccgcgtcgagaatgaactgaccgacgaagttacccacatcgtggcagaaaatctgtcacgctctgaagtattggcttggctgaaagaacacaagatggagaagaccaagcaattcgaactgctggatattagctggcttatcgaaagcatgaaagttggtaaaccggtggacaccaaggggaaataccagttggcggaatcggttgaggtgagtgcgaacccagatccgacagaaggtcgtgtaaacgagctgcctcctactatgaaaaccgtttctccgtatgcgtgtcaacgccgcaccaccctgaacaaccgtaatcaacgttttacggactcgctggagattcttcgcgagaattacgtgtggaaaggcaacgatgatactgcgctggaatttcgtcgtgctatctccgtgctgaaaagccttccgtttgaggtacgtagcctgaaagacacggaaggattgccctggatcagtgatgaagtcaaagggattatggaagaaatcatcgaagtcggggagtcgcgtgaagtgcaggccgtgctcaatgatgagtggtatcaaagcttccacgcatttacgcgtgtctttggagtgggggtgaagacagcagacaagtggtaccgcatgggtctgcgcaccctggaggatgttcgttccagcaagaccctgaagttgaccacgtgggcgaaagtaggtctgacgtattatgaagatcttgcgcgcggcgttacccgtgcggaagctgacgcgatttggctgctggttcaggatgcagtcgcaactttcgacccggatgcgatcgtggagattgtcggtggacagcgtcgtgggaaacctcagtctcacgacgttgatctgcttatcagttctccgggagctgaaaaagagcaagaagaccaactcctgcagaaagtgatgaatctgtggaagaaacaagggttgttgctgtgtggtaaagtggtgtggagtcagtgggaatgggggggtctgccgtccggtaaggctgatgagggggacggggaggcatcgtgctttctgatcctcaaactttatgatcatctggtgcgtaaaagtaaacataatatgccgactggttcgaacatgggcgagtccaaaccgtggaaagcaattaaagtagatctgctgcgttgcccccgcggcagttttgcgtttgcgatgttgcagtggaccggaagccgcatgttccgtcgcgatctgcgcgattacgcccgcgaagagaagaacatgatgctggacaatcatagcctgtatgacatgactcgtggtatccaactccctgctaaatcggaagaggaaattttcgaacatctggggcttgaatacctggaaccgttcgaacgtaacgca

SEQ ID NO: 5186 - protein, 529 aa, synthetic construct
  REGION 1..529: note = Variant of terminal deoxynucleotidyltransferase
MHHHHHHGGSGSHGIRTIDSDFGKKQQKKGDNHDSSATYEIKFHEFVLFILEEKMGATRRTFLTDLARKKGFRVENELTDEVTHIVAENLSRSEVLAWLKEHKMEKTKQFELLDISWLIESMKVGKPVDTKGKYQLAESVEVSANPDPTEGRVNELPPTMKTVSPYACQRRTTLNNRNQRFTDSLEILRENYVWKGNDDTALEFRRAISVLKSLPFEVRSLKDTEGLPWISDEVKGIMEEIIEVGESREVQAVLNDEWYQSFHAFTRVFGVGVKTADKWYRMGLRTLEDVRSSKTLKLTTWAKVGLTYYEDLARGVTRAEADAIWLLVQDAVATFDPDAIVEIVGGQRRGKPQSHDVDLLISSPGAEKEQEDQLLQKVMNLWKKQGLLLCGKVVWSQWEWGGLPSGKADEGDGEASCFLILKLYDHLVRKSKHNMPTGSNMGESKPWKAIKVDLLRCPRGSFAFAMLQWTGSRMFRRDLRDYAREEKNMMLDNHSLYDMTRGIQLPAKSEEEIFEHLGLEYLEPFERNA

SEQ ID NO: 5187 - DNA, 1587 bp, synthetic construct
  misc_feature 1..1587: note = Variant of terminal deoxynucleotidyltransferase
  source 1..1587: mol_type = other DNA
atgcaccatcatcatcatcatggcggtagcggcagccacggcattcgtaccatcgattcggacttcgggaagaaacagcagaaaaaaggcgataaccacgatagttccgccacttatgaaatcaaatttcacgagtttgtgctgttcattctcgaagaaaaaatgggtgcgacgcgtcgtacttttctgacagatttagcccgcaagaaagggttccgcgtcgagaatgaactgaccgacgaagttacccacatcgtggcagaaaatctgtcacgctctgaagtattggcttggctgaaagaacacaagatggagaagaccaagcaattcgaactgctggatattagctggcttatcgaaagcatgaaagttggtaaaccggtggacaccaaggggaaataccagttggcggaatcggttgaggtgagtgcgaacccagatccgacagaaggtcgtgtaaacgagctgcctcctactatgaaaaccgtttctccgtatgcgtgtcaacgccgcaccaccctgaacaaccgtaatcaacgttttacggactcgctggagattcttcgcgagaattacgtgtttaaaggcaacgacgatactgcgctggaatttcgtcgtgctatctccgtgctgaaaagccttccgtttgaggtacgtagcctgaaagacacggaaggattgccctggatcagtgatgaagtcaaagggattatggaagaaatcatcgaagtcggggagtcgcgtgaagtgcaggccgtgctcaatgatgagtggtatcaaagcttccacgcatttacgcgtgtctttggagtgggggtagtgacagcagacaagtggtaccgcatgggtctgcgcaccctggaggatgttcgttccagcaagaccctgaagttgaccacgtgggcgaaagtaggtctgacgtattatgaagatcttgctcgcggcgttacccgtgcggaagctgacgcgatttggctgctggttcaggatgcagtcgcaactttcgacccggatgcgatcgtggagattgtcggtggacagcgtcgtgggaaacctcagtctcacgacgttgatgtgcttatcagttctccgggagctgaaaaagagcaagaagaccaactcctgcagaaagtgatgaatctgtggaagaaacaagggttgttgctgtgtggtaaagtggtgtggagtcagtgggaatgggggggtctgccgtccggtaaggctgatgagggtgacggggaggcatcgtgctttctgatcctcaaactttatgatcatctggtgcgtaaaagtaaacataatatgccgactggttcgaacatgggcgagtccaaaccgtggaaagcaattaaagtagatctgctgcgttgcccccgcggcagttttgcgtttgcgatgttgcagtggaccggaagccgcatgttccgtcgcgatctgcgcgattacgcccgcgaagagaagaacatgatgctggacaatcatagcctgtatgacatgactcgtggtatccaactccctgctaaatcggaagaggaaattttcgaacatctggggcttgaatacctggaaccgttctatcgtaacgca

SEQ ID NO: 5188 - protein, 529 aa, synthetic construct
  REGION 1..529: note = Variant of terminal deoxynucleotidyltransferase
MHHHHHHGGSGSHGIRTIDSDFGKKQQKKGDNHDSSATYEIKFHEFVLFILEEKMGATRRTFLTDLARKKGFRVENELTDEVTHIVAENLSRSEVLAWLKEHKMEKTKQFELLDISWLIESMKVGKPVDTKGKYQLAESVEVSANPDPTEGRVNELPPTMKTVSPYACQRRTTLNNRNQRFTDSLEILRENYVFKGNDDTALEFRRAISVLKSLPFEVRSLKDTEGLPWISDEVKGIMEEIIEVGESREVQAVLNDEWYQSFHAFTRVFGVGVVTADKWYRMGLRTLEDVRSSKTLKLTTWAKVGLTYYEDLARGVTRAEADAIWLLVQDAVATFDPDAIVEIVGGQRRGKPQSHDVDVLISSPGAEKEQEDQLLQKVMNLWKKQGLLLCGKVVWSQWEWGGLPSGKADEGDGEASCFLILKLYDHLVRKSKHNMPTGSNMGESKPWKAIKVDLLRCPRGSFAFAMLQWTGSRMFRRDLRDYAREEKNMMLDNHSLYDMTRGIQLPAKSEEEIFEHLGLEYLEPFYRNA

SEQ ID NO: 5189 - DNA, 1587 bp, synthetic construct
  misc_feature 1..1587: note = Variant of terminal deoxynucleotidyltransferase
  source 1..1587: mol_type = other DNA
atgcaccatcatcatcatcatggcggtagcggcagccacggcattcgtaccatcgattcggacttcgggaagaaacagcagaaaaaaggcgataaccacgatagttccgccacttatgaaatcaaatttcacgagtttgtgctgttcattctcgaagaaaaaatgggtgcgacgcgtcgtacttttctgacagatttagcccgcaagaaagggttccgcgtcgagaatgaactgaccgacgaagttacccacatcgtggcagaaaatctgtcacgctctgaagtattggcttggctgaaagaacacaagatggagaagaccaagcaattcgaactgctggatattagctggcttatcgaaagcatgaaagttggtaaaccggtggacaccaaggggaaataccagttggcggaatcggttgaggtgagtgcgaacccagatccgacagaaggtcgtgtaaacgagctgcctcctactatgaaaaccgtttctccgtatgcgtgtcaacgccgcaccaccctgaacaaccgtaatcaacgttttacggactcgctggagattcttcgcgagaattacgtgtttaaaggcaacgacgatactgcgctggaatttcgtcgtgctatctccgtgctgaaaagccttccgtttgaggtacgtagcctgaaagacacggaaggattgccctggatcagtgatgaagtcaaagggattatggaagaaatcatcgaagtcggggagtcgcgtgaagtgcaggccgtgctcaatgatgagtggtatcaaagcttccacgcatttacgcgtgtctttggagtgggggtagtgacagcagacaagtggtaccgcatgggtctgcgcaccctggaggatgttcgttccagcaagaccctgaagttgaccacgtgggcgaaagtaggtctgacgtattatgaagatcttgctcgcggcgttacccgtgcggaagctgacgcgatttggctgctggttcaggatgcagtcgcaactttcgacccggatgcgatcgtggagattgtcggtggacagcgtcgtgggaaacctcagtctcacgacgttgatctgcttatcagttctccgggagctgaaaaagagcaagaagaccaactcctgcagaaagtgatgaatctgtggaagaaacaagggttgttgctgtgtggtaaagtggtgtggagtcagtgggaatgggggggtctgccgtccggtaaggctgatgagggtgacggggaggcatcgtgctttctgatcctcaaactttatgatcatctggtgcgtaaaagtaaacataatatgccgactggttcgaacatgggcgagtccaaaccgtggaaagcaattaaagtagatctgctgcgttgcccccgcggcagttttgcgtttgcgatgttgcagtggaccggaagccgcatgttccgtcgcgatctgcgcgattacgcccgcgaagagaagaacatgatgctggacaatcatagcctgtatgacatgactcgtggtatccaactccctgctaaatcggaagaggaaattttcgaacatctggggcttgaatacctggaaccgttcgaacgtaacgca

SEQ ID NO: 5190 - protein, 529 aa, synthetic construct
  REGION 1..529: note = Variant of terminal deoxynucleotidyltransferase
MHHHHHHGGSGSHGIRTIDSDFGKKQQKKGDNHDSSATYEIKFHEFVLFILEEKMGATRRTFLTDLARKKGFRVENELTDEVTHIVAENLSRSEVLAWLKEHKMEKTKQFELLDISWLIESMKVGKPVDTKGKYQLAESVEVSANPDPTEGRVNELPPTMKTVSPYACQRRTTLNNRNQRFTDSLEILRENYVFKGNDDTALEFRRAISVLKSLPFEVRSLKDTEGLPWISDEVKGIMEEIIEVGESREVQAVLNDEWYQSFHAFTRVFGVGVVTADKWYRMGLRTLEDVRSSKTLKLTTWAKVGLTYYEDLARGVTRAEADAIWLLVQDAVATFDPDAIVEIVGGQRRGKPQSHDVDLLISSPGAEKEQEDQLLQKVMNLWKKQGLLLCGKVVWSQWEWGGLPSGKADEGDGEASCFLILKLYDHLVRKSKHNMPTGSNMGESKPWKAIKVDLLRCPRGSFAFAMLQWTGSRMFRRDLRDYAREEKNMMLDNHSLYDMTRGIQLPAKSEEEIFEHLGLEYLEPFERNA

SEQ ID NO: 5191 - DNA, 1587 bp, synthetic construct
  misc_feature 1..1587: note = Variant of terminal deoxynucleotidyltransferase
  source 1..1587: mol_type = other DNA
atgcaccatcatcatcatcatggcggtagcggcagccacggcattcgtaccatcgattcggacttcgggaagaaacagcagaaaaaaggcgataaccacgatagttccgccacttatgaaatcaaatttcacgagtttgtgctgttcattctcgaagaaaaaatgggtgcgacgcgtcgtacttttctgacagatttagcccgcaagaaagggttccgcgtcgagaatgaactgaccgacgaagttacccacatcgtggcagaaaatctgtcacgctctgaagtattggcttggctgaaagaacacaagatggagaagaccaagcaattcgaactgctggatattagctggcttatcgaaagcatgaaagttggtaaaccggtggacaccaaggggaaataccagttggcggaatcggttgaggtgagtgcgaacccagatccgacagaaggtcgtgtaaacgagctgcctcctactatgaaaaccgtttctccgtatgcgtgtcaacgccgcaccaccctgaacaaccgtaatcaacgttttacggactcgctggagattcttcgcgagaattacgtgtttaaaggcaacgacgatactgcgctggaatttcgtcgtgctatctccgtgctgaaaagccttccgtttgaggtacgtagcctgaaagacacggaaggattgccctggatcagtgatgaagtcaaagggattatggaagaaatcatcgaagtcggggagtcgcgtgaagtgcaggccgtgctcaatgatgagtggtatcaaagcttccacgcatttacgcgtgtctttggagtgggggtaggcacagcagacaagtggtaccagatgggtctgcgcaccctggaggatgttcgttccagcaagaccctgaagttgaccacgtgggcgaaagtaggtctgacgtattatgaagatcttgctcgcggcgttacccgtgcggaagctgacgcgatttggctgctggttcaggatgcagtcgcaactttcgacccggatgcgatcgtggagattgtcggtggacagcgtcgtgggaaacctcagtctcacgacgttgatctgcttatcagttctccgggagctgaaaaagagcaagaagaccaactcctgcagaaagtgatgaatctgtggaagaaacaagggttgttgctgtgtggtaaagtggtgtggagtcagtgggaatgggggggtctgccgtccggtaaggctgatgagggtgacggggaggcatcgtgctttctgatcctcaaactttatgatcatctggtgcgtaaaagtaaacataatatgccgactggttcgaacatgggcgagtccaaaccgtggaaagcaattaaagtagatctgctgcgttgcccccgcggcagttttgcgtttgcgatgttgcagtggaccggaagccgcatgttccgtcgcgatctgcgcgattacgcccgcgaagagaagaacatgatgctggacaatcatagcctgtatgacatgactcgtggtatccaactccctgctaaatcggaagaggaaattttcgaacatctggggcttgaatacctggaaccgttctatcgtaacgca

SEQ ID NO: 5192 - protein, 529 aa, synthetic construct
  REGION 1..529: note = Variant of terminal deoxynucleotidyltransferase
MHHHHHHGGSGSHGIRTIDSDFGKKQQKKGDNHDSSATYEIKFHEFVLFILEEKMGATRRTFLTDLARKKGFRVENELTDEVTHIVAENLSRSEVLAWLKEHKMEKTKQFELLDISWLIESMKVGKPVDTKGKYQLAESVEVSANPDPTEGRVNELPPTMKTVSPYACQRRTTLNNRNQRFTDSLEILRENYVFKGNDDTALEFRRAISVLKSLPFEVRSLKDTEGLPWISDEVKGIMEEIIEVGESREVQAVLNDEWYQSFHAFTRVFGVGVGTADKWYQMGLRTLEDVRSSKTLKLTTWAKVGLTYYEDLARGVTRAEADAIWLLVQDAVATFDPDAIVEIVGGQRRGKPQSHDVDLLISSPGAEKEQEDQLLQKVMNLWKKQGLLLCGKVVWSQWEWGGLPSGKADEGDGEASCFLILKLYDHLVRKSKHNMPTGSNMGESKPWKAIKVDLLRCPRGSFAFAMLQWTGSRMFRRDLRDYAREEKNMMLDNHSLYDMTRGIQLPAKSEEEIFEHLGLEYLEPFYRNA

SEQ ID NO: 5193 - DNA, 1587 bp, synthetic construct
  misc_feature 1..1587: note = Variant of terminal deoxynucleotidyltransferase
  source 1..1587: mol_type = other DNA
atgcaccatcatcatcatcatggcggtagcggcagccacggcattcgtaccatcgattcggacttcgggaagaaacagcagaaaaaaggcgataaccacgatagttccgccacttatgaaatcaaatttcacgagtttgtgctgttcattctcgaagaaaaaatgggtgcgacgcgtcgtacttttctgacagatttagcccgcaagaaagggttccgcgtcgagaatgaactgaccgacgaagttacccacatcgtggcagaaaatctgtcacgctctgaagtattggcttggctgaaagaacacaagatggagaagaccaagcaattcgaactgctggatattagctggcttatcgaaagcatgaaagttggtaaaccggtggacaccaaggggaaataccagttggcggaatcggttgaggtgagtgcgaacccagatccgacagaaggtcgtgtaaacgagctgcctcctactatgaaaaccgtttctccgtatgcgtgtcaacgccgcaccaccctgaacaaccgtaatcaacgttttacggactcgctggagattcttcgcgagaattacgtgttcaaaggcaacgtggatactgcgctggaatttcgtcgtgctagttccgtgctgaaaagccttccgtttgaggtacgtagcctgaaagacacggaaggattgccctggatcagtgatgaagtcaaagggattatggaagaaatcatcgaagtcggggagtcgcgtgaagtgcaggccgtgctcaatgatgagtggtatcaaagcttccacgcatttacgcgtgtctttggagtgggggtgaagacagcagacaagtggtaccgcatgggtctgcgcaccctggaggatgttcgttccagcaagaccctgaagttgaccacgtgggcgaaagtaggtctgacgtattatgaagatcttgctcgcggcgttacccgtgcggaagctgacgcgatttggctgctggttcaggatgcagtcgcaactttcgacccggatgcgatcgtggagattgtcggtggacagcgtcgtgggaaacctcagtctcacgacgttgatctgcttatcagttctccgggagctgaaaaagagcaagaagaccaactcctgcagaaagtgatgaatctgtggaagaaacaagggttgttgctgtgtggtaaagtggtgtggagtcagtgggaatgggggggtctgccgtccggtaaggctgatgagggggacggggaggcatcgtgctttctgatcctcaaactttatgatcatctggtgcgtaaaagtaaacataatatgccgactggttcgaacatgggcgagtccaaaccgtggaaagcaattaaagtagatctgctgcgttgcccccgcggcagttttgcgtttgcgatgttgcagtggaccggaagccgcatgttccgtcgcgatctgcgcgattacgcccgcgaagagaagaacatgatgctggacaatcatagcctgtatgacatgactcgtggtatccaactccctgctaaatcggaagaggaaattttcgaacatctggggcttgaatacctggaaccgttcgaacgtaacgca

SEQ ID NO: 5194 - protein, 529 aa, synthetic construct
  REGION 1..529: note = Variant of terminal deoxynucleotidyltransferase
MHHHHHHGGSGSHGIRTIDSDFGKKQQKKGDNHDSSATYEIKFHEFVLFILEEKMGATRRTFLTDLARKKGFRVENELTDEVTHIVAENLSRSEVLAWLKEHKMEKTKQFELLDISWLIESMKVGKPVDTKGKYQLAESVEVSANPDPTEGRVNELPPTMKTVSPYACQRRTTLNNRNQRFTDSLEILRENYVFKGNVDTALEFRRASSVLKSLPFEVRSLKDTEGLPWISDEVKGIMEEIIEVGESREVQAVLNDEWYQSFHAFTRVFGVGVKTADKWYRMGLRTLEDVRSSKTLKLTTWAKVGLTYYEDLARGVTRAEADAIWLLVQDAVATFDPDAIVEIVGGQRRGKPQSHDVDLLISSPGAEKEQEDQLLQKVMNLWKKQGLLLCGKVVWSQWEWGGLPSGKADEGDGEASCFLILKLYDHLVRKSKHNMPTGSNMGESKPWKAIKVDLLRCPRGSFAFAMLQWTGSRMFRRDLRDYAREEKNMMLDNHSLYDMTRGIQLPAKSEEEIFEHLGLEYLEPFERNA

SEQ ID NO: 5195 - DNA, 1587 bp, synthetic construct
  misc_feature 1..1587: note = Variant of terminal deoxynucleotidyltransferase
  source 1..1587: mol_type = other DNA
atgcaccatcatcatcatcatggcggtagcggcagccacggcattcgtaccatcgattcggacttcgggaagaaacagcagaaaaaaggcgataaccacgatagttccgccacttatgaaatcaaatttcacgagtttgtgctgttcattctcgaagaaaaaatgggtgcgacgcgtcgtacttttctgacagatttagcccgcaagaaagggttccgcgtcgagaatgaactgaccgacgaagttacccacatcgtggcagaaaatctgtcacgctctgaagtattggcttggctgaaagaacacaagatggagaagaccaagcaattcgaactgctggatattagctggcttatcgaaagcatgaaagttggtaaaccggtggacaccaaggggaaataccagttggcggaatcggttgaggtgagtgcgaacccagatccgacagaaggtcgtgtaaacgagctgcctcctactatgaaaaccgtttctccgtatgcgtgtcaacgccgcaccaccctgaacaaccgtaatcaacgttttacggactcgctggagattcttcgcgagaattacgtgttcaaaggcaacgatgatactgcgctggaatttcgtcgtgctatctccgtgctgaaaagccttccgtttgaggtacgtagcctgaaagacacggaaggattgccctggatcagtgatgaagtcaaagggattatggaagaaatcatcgaagtcggggagtcgcgtgaagtgcaggccgtgctcaatgatgagtggtatcaaagcttccacgcatttacgcgtgtctttggagtgggggtgaagacagcagacaagtggtaccgcatgggtctgcgcaccctggaggatgttcgttccagcaagaccctgaagttgaccacgtgggcgaaagtaggtctgacgtatcgtgaagatcttagtcgcggcgttacccgtgcggaagctgacgcgatttggctgctggttcaggatgcagtcgcaactttcgacccggatgcgatcgtggagattgtcggtggacagcgtcgtgggaaacctcagtctcacgacgttgatctgcttatcagttctccgggagctgaaaaagagcaagaagaccaactcctgcagaaagtgatgaatctgtggaagaaacaagggttgttgctgtgtggtaaagtggtgtggagtcagtgggaatgggggggtctgccgtccggtaaggctgatgagctggacggggaggcatcgtgctttctgatcctcaaactttatgatcatctggtgcgtaaaagtaaacataatatgccgactggttcgaacatgggcgagtccaaaccgtggaaagcaattaaagtagatctgctgcgttgcccccgcggcagttttgcgtttgcgatgttgcagtggaccggaagccgcatgttccgtcgcgatctgcgcgattacgcccgcgaagagaagaacatgatgctggacaatcatagcctgtatgacatgactcgtggtatccaactccctgctaaatcggaagaggaaattttcgaacatctggggcttgaatacctggaaccgttcgaacgtaacgca

SEQ ID NO: 5196 - protein, 529 aa, synthetic construct
  REGION 1..529: note = Variant of terminal deoxynucleotidyltransferase
MHHHHHHGGSGSHGIRTIDSDFGKKQQKKGDNHDSSATYEIKFHEFVLFILEEKMGATRRTFLTDLARKKGFRVENELTDEVTHIVAENLSRSEVLAWLKEHKMEKTKQFELLDISWLIESMKVGKPVDTKGKYQLAESVEVSANPDPTEGRVNELPPTMKTVSPYACQRRTTLNNRNQRFTDSLEILRENYVFKGNDDTALEFRRAISVLKSLPFEVRSLKDTEGLPWISDEVKGIMEEIIEVGESREVQAVLNDEWYQSFHAFTRVFGVGVKTADKWYRMGLRTLEDVRSSKTLKLTTWAKVGLTYREDLSRGVTRAEADAIWLLVQDAVATFDPDAIVEIVGGQRRGKPQSHDVDLLISSPGAEKEQEDQLLQKVMNLWKKQGLLLCGKVVWSQWEWGGLPSGKADELDGEASCFLILKLYDHLVRKSKHNMPTGSNMGESKPWKAIKVDLLRCPRGSFAFAMLQWTGSRMFRRDLRDYAREEKNMMLDNHSLYDMTRGIQLPAKSEEEIFEHLGLEYLEPFERNA

SEQ ID NO: 5197 - DNA, 1587 bp, synthetic construct
  misc_feature 1..1587: note = Variant of terminal deoxynucleotidyltransferase
  source 1..1587: mol_type = other DNA
atgcaccatcatcatcatcatggcggtagcggcagccacggcattcgtaccatcgattcggacttcgggaagaaacagcagaaaaaaggcgataaccacgatagttccgccacttatgaaatcaaatttcacgagtttgtgctgttcattctcgaagaaaaaatgggtgcgacgcgtcgtacttttctgacagatttagcccgcaagaaagggttccgcgtcgagaatgaactgaccgacgaaattacccacatcgtggcagaaaatctgtcacgctctgaagtattggcttggctgaaagaacacaagatggagaagaccaagcaattcgaactgctggatattagctggcttatcgaaagcatgaaagttggtaaaccggtggacaccaaggggaaataccagttggcggaatcggttgaggtgagtgcgaacccagatccgacagaaggtcgtgtaaacgagctgcctcctactatgaaaaccgtttctccgtatgcgtgtcaacgccgcaccaccctgaacaaccgtaatcaacgttttacggactcgctggagattcttcgcgagaattacgtgctgaaaggcaacggggatactgcgctggaatttcgtcgtgctatctccgtgctgaaaagccttccgtttgaggtacgtagcctgaaagacacggaaggattgccctggatcagtgatgaagtcaaagggattatggaagaaatcatcgaagtcggggagtcgcgtgaagtgcaggccgtgctcaatgatgagtggtatcaaagcttccacgcatttacgcgtgtctttggagtgggggtgaagacagcagacaagtggtaccgcatgggtctgcgcaccctggaggatgttcgttccagcaagaccctgaagttgaccacgtgggcgaaagtaggtctgacgtattacgaagatcttagtcgcggcgttacccgtgcggaagctgacgcgatttggctgctggttcaggatgcagtcgcaactttcgacccggatgcgatcgtggagattgtcggtggacagcgtcgtgggaaacctcagtctcacgacgttgatctgcttatcagttctccgggagctgaaaaagagcaagaagaccaactcctgcagaaagtgatgaatctgtggaagaaacaagggttgttgctgtgtggtaaagtggtgtggagtcagtgggaatgggggggtctgccgtccggtaaggctgatgagggggacggggaggcatcgtgctttctgatcctcaaactttatgatcatctggtgcgtaaaagtaaacataatatgccgactggttcgaacatgggcgagtccaaaccgtggaaagcaattaaagtagatctgctgcgttgcccccgcggcagttttgcgtttgcgatgttgcagtggaccggaagccgcatgttccgtcgcgatctgcgcgattacgcccgcgaagagaagaacatgatgctggacaatcatagcctgtatgacatgactcgtggtatccaactccctgctaaatcggaagaggaaattttcgaacatctggggcttgaatacctggaaccgttcgaacgtaacgca

SEQ ID NO: 5198 - protein, 529 aa, synthetic construct
  REGION 1..529: note = Variant of terminal deoxynucleotidyltransferase
MHHHHHHGGSGSHGIRTIDSDFGKKQQKKGDNHDSSATYEIKFHEFVLFILEEKMGATRRTFLTDLARKKGFRVENELTDEITHIVAENLSRSEVLAWLKEHKMEKTKQFELLDISWLIESMKVGKPVDTKGKYQLAESVEVSANPDPTEGRVNELPPTMKTVSPYACQRRTTLNNRNQRFTDSLEILRENYVLKGNGDTALEFRRAISVLKSLPFEVRSLKDTEGLPWISDEVKGIMEEIIEVGESREVQAVLNDEWYQSFHAFTRVFGVGVKTADKWYRMGLRTLEDVRSSKTLKLTTWAKVGLTYYEDLSRGVTRAEADAIWLLVQDAVATFDPDAIVEIVGGQRRGKPQSHDVDLLISSPGAEKEQEDQLLQKVMNLWKKQGLLLCGKVVWSQWEWGGLPSGKADEGDGEASCFLILKLYDHLVRKSKHNMPTGSNMGESKPWKAIKVDLLRCPRGSFAFAMLQWTGSRMFRRDLRDYAREEKNMMLDNHSLYDMTRGIQLPAKSEEEIFEHLGLEYLEPFERNA

SEQ ID NO: 5199 - DNA, 1587 bp, synthetic construct
  misc_feature 1..1587: note = Variant of terminal deoxynucleotidyltransferase
  source 1..1587: mol_type = other DNA
atgcaccatcatcatcatcatggcggtagcggcagccacggcattcgtaccatcgattcggacttcgggaagaaacagcagaaaaaaggcgataaccacgatagttccgccacttatgaaatcaaatttcacgagtttgtgctgttcattctcgaagaaaaaatgggtgcgacgcgtcgtacttttctgacagatttagcccgcaagaaagggttccgcgtcgagaatgaactgaccgacgaagttacccacatcgtggcagaaaatctgtcacgctctgaagtattggcttggctgaaagaacacaagatggagaagaccaagcaattcgaactgctggatattagctggcttatcgaaagcatgaaagttggtaaaccggtggacaccaaggggaaataccagttggcggaatcggttgaggtgagtgcgaacccagatccgacagaaggtcgtgtaaacgagctgcctcctactatgaaaaccgtttctccgtatgcgtgtcaacgccgcaccaccctgaacaaccgtaatcaacgttttacggactcgctggagattcttcgcgagaattacgtgtttaaaggcaacgacgatactgcgctggaatttcgtcgtgctatctccgtgctgaaaagccttccgtttgaggtacgtagcctgaaagacacggaaggattgccctggatcagtgatgaagtcaaagggattatggaagaaatcatcgaagtcggggagtcgcgtgaagtgcaggccgtgctcaatgatgagtggtatcaaagcttccacgcatttacgcgtgtctttggagtgggggtgaagacagcagacaagtggtaccgcatgggtctgcgcaccctggaggatgttcgttccagcaagaccctgaagttgaccacgtgggcgaaagtaggtctgacgtattatgaagatcttgctcgcggcgttacccgtgcggaagctgacgcgatttggctgctggttcaggatgcagtcgcaactttcgacccggatgcgatcgtggagattgtcggtggacagcgtcgtgggaaacctcagtctcacgacgttgatctgcttatcagttctccgggagctgaaaaagagcaagaagaccaactcctgcagaaagtgatgaatctgtggaagaaacaagggttgttgctgtgtggtaaagtggtgtggagtcagtgggaatgggggggtctgccgtccggtaaggctgatgagggtgacggggaggcatcgtgctttctgatcctcaaactttatgatcatctggtgcgtaaaagtaaacataatatgccgactggttcgaacatgggcgagtccaaaccgtggaaagcaattaaagtagatctgctgcgttgcccccgcggcagttttgcgtttgcggtgttgcagtggaccggaagccgcatgttccgtcgcgatctgcgcgattacgcccgcgaagagaagaacatgatgctggacaatcatagcctgtatgacatgactcgtggtatccaactccctgctaaatcggaagaggaaattttcgaacatctggggcttgaatacctggaaccgttctatcgtaacgca

SEQ ID NO: 5200 - protein, 529 aa, synthetic construct
  REGION 1..529: note = Variant of terminal deoxynucleotidyltransferase
MHHHHHHGGSGSHGIRTIDSDFGKKQQKKGDNHDSSATYEIKFHEFVLFILEEKMGATRRTFLTDLARKKGFRVENELTDEVTHIVAENLSRSEVLAWLKEHKMEKTKQFELLDISWLIESMKVGKPVDTKGKYQLAESVEVSANPDPTEGRVNELPPTMKTVSPYACQRRTTLNNRNQRFTDSLEILRENYVFKGNDDTALEFRRAISVLKSLPFEVRSLKDTEGLPWISDEVKGIMEEIIEVGESREVQAVLNDEWYQSFHAFTRVFGVGVKTADKWYRMGLRTLEDVRSSKTLKLTTWAKVGLTYYEDLARGVTRAEADAIWLLVQDAVATFDPDAIVEIVGGQRRGKPQSHDVDLLISSPGAEKEQEDQLLQKVMNLWKKQGLLLCGKVVWSQWEWGGLPSGKADEGDGEASCFLILKLYDHLVRKSKHNMPTGSNMGESKPWKAIKVDLLRCPRGSFAFAVLQWTGSRMFRRDLRDYAREEKNMMLDNHSLYDMTRGIQLPAKSEEEIFEHLGLEYLEPFYRNA

SEQ ID NO: 5201 - DNA, 1587 bp, synthetic construct
  misc_feature 1..1587: note = Variant of terminal deoxynucleotidyltransferase
  source 1..1587: mol_type = other DNA
atgcaccatcatcatcatcatggcggtagcggcagccacggcattcgtaccatcgattcggacttcgggaagaaacagcagaaaaaaggcgataaccacgatagttccgccacttatgaaatcaaatttcacgagtttgtgctgttcattctcgaagaaaaaatgggtgcgacgcgtcgtacttttctgacagatttagcccgcaagaaagggttccgcgtcgagaatgaactgaccgacgaagttacccacatcgtggcagaaaatctgtcacgctctgaagtattggcttggctgaaagaacacaagatggagaagaccaagcaattcgaactgctggatattagctggcttatcgaaagcatgaaagttggtaaaccggtggacaccaaggggaaataccagttggcggaatcggttgaggtgagtgcgaacccagatccgacagaaggtcgtgtaaacgagctgcctcctactatgaaaaccgtttctccgtatgcgtgtcaacgccgcaccaccctgaacaaccgtaatcaacgttttacggactcgctggagattcttcgcgagaattacgtgtttaaaggcaacgacgatactgcgctggaatttcgtcgtgctatctccgtgctgaaaagccttccgtttgaggtacgtagcctgaaagacacggaaggattgccctggatcagtgatgaagtcaaagggattatggaagaaatcatcgaagtcggggagtcgcgtgaagtgcaggccgtgctcaatgatgagtggtatcaaagcttccacgcatttacgcgtgtctttggagtgggggtgaagacagcagacaagtggtaccgcatgggtctgcgcaccctggaggatgttcgttccagcaagaccctgaagttgaccacgtgggcgaaagtaggtctgacgtatcgtgaagatcttgctcgcggcgttacccgtgcggaagctgacgcgatttggctgctggttcaggatgcagtcgcaactttcgacccggatgcgatcgtggagattgtcggtggacagcgtcgtgggaaacctcagtctcacgacgttgatctgcttatcagttctccgggagctgaaaaagagcaagaagaccaactcctgcagaaagtgatgaatctgtggaagaaacaagggttgttgctgtgtggtaaagtggtgtggagtcagtgggaatgggggggtctgccgtccggtaaggctgatgagggggacggggaggcatcgtgctttctgatcctcaaactttatgatcatctggtgcgtaaaagtaaacataatatgccgactggttcgaacatgggcgagtccaaaccgtggaaagcaattaaagtagatctgctgcgttgcccccgcggcagttttgcgtttgcgatgttgcagtggaccggaagccgcatgttccgtcgcgatctgcgcgattacgcccgcgaagagaagaacatgatgctggacaatcatagcctgtatgacatgactcgtggtatccaactccctgctaaatcggaagaggaaattttcgaacatctggggcttgaatacctggaaccgttcgaacgtaacgca

SEQ ID NO: 5202 - protein, 529 aa, synthetic construct
  REGION 1..529: note = Variant of terminal deoxynucleotidyltransferase
MHHHHHHGGSGSHGIRTIDSDFGKKQQKKGDNHDSSATYEIKFHEFVLFILEEKMGATRRTFLTDLARKKGFRVENELTDEVTHIVAENLSRSEVLAWLKEHKMEKTKQFELLDISWLIESMKVGKPVDTKGKYQLAESVEVSANPDPTEGRVNELPPTMKTVSPYACQRRTTLNNRNQRFTDSLEILRENYVFKGNDDTALEFRRAISVLKSLPFEVRSLKDTEGLPWISDEVKGIMEEIIEVGESREVQAVLNDEWYQSFHAFTRVFGVGVKTADKWYRMGLRTLEDVRSSKTLKLTTWAKVGLTYREDLARGVTRAEADAIWLLVQDAVATFDPDAIVEIVGGQRRGKPQSHDVDLLISSPGAEKEQEDQLLQKVMNLWKKQGLLLCGKVVWSQWEWGGLPSGKADEGDGEASCFLILKLYDHLVRKSKHNMPTGSNMGESKPWKAIKVDLLRCPRGSFAFAMLQWTGSRMFRRDLRDYAREEKNMMLDNHSLYDMTRGIQLPAKSEEEIFEHLGLEYLEPFERNA

SEQ ID NO: 5203 - DNA, 1587 bp, synthetic construct
  misc_feature 1..1587: note = Variant of terminal deoxynucleotidyltransferase
  source 1..1587: mol_type = other DNA
atgcaccatcatcatcatcatggcggtagcggcagccacggcattcgtaccatcgattcggacttcgggaagaaacagcagaaaaaaggcgataaccacgatagttccgccacttatgaaatcaaatttcacgagtttgtgctgttcattctcgaagaaaaaatgggtgcgacgcgtcgtacttttctgacagatttagcccgcaagaaagggttccgcgtcgagaatgaactgaccgacgaagttacccacatcgtggcagaaaatctgtcacgctctgaagtattggcttggctgaaagaacacaagatggagaagaccaagcaattcgaactgctggatattagctggcttatcgaaagcatgaaagttggtaaaccggtggacaccaaggggaaataccagttggcggaatcggttgaggtgagtgcgaacccagatccgacagaaggtcgtgtaaacgagctgcctcctactatgaaaaccgtttctccgtatgcgtgtcaacgccgcaccaccctgaacaaccgtaatcaacgttttacggactcgctggagattcttcgcgagaattacgtgctgaaaggcaacgtggatactgcgctggaatttcgtcgtgctatctccgtgctgaaaagccttccgtttgaggtacgtagcctgaaagacacggaaggattgccctggatcagtgatgaagtcaaagggattatggaagaaatcatcgaagtcggggagtcgcgtgaagtgcaggccgtgctcaatgatgagtggtatcaaagcttccacgcatttacgcgtgtctttggagtgggggtgaagacagcagacaagtggtaccgcatgggtctgcgcaccctggaggatgttcgttccagcaagaccctgaagttgaccacgtgggcgaaagtaggtctgacgtattatgaagatcttgcgcgcggcgttacccgtgcggaagctgacgcgatttggctgctggttcaggatgcagtcgcaactttcgacccggatgcgatcgtggagattgtcggtggacagcgtcgtgggaaacctcagtctcacgacgttgatctgcttatcagttctccgggagctgaaaaagagcaagaagaccaactcctgcagaaagtgatgaatctgtggaagaaacaagggttgttgctgtgtggtaaagtggtgtggagtcagtgggaatgggggggtctgccgtccggtaaggctgatgagctggacggggaggcatcgtgctttctgatcctcaaactttatgatcatctggtgcgtaaaagtaaacataatatgccgactggttcgaacatgggcgagtccaaaccgtggaaagcaattaaagtagatctgctgcgttgcccccgcggcagttttgcgtttgcgatgttgcagtggaccggaagccgcatgttccgtcgcgatctgcgcgattacgcccgcgaagagaagaacatgatgctggacaatcatagcctgtatgacatgactcgtggtatccaactccctgctaaatcggaagaggaaattttcgaacatctggggcttgaatacctggaaccgttcgaacgtaacgca

SEQ ID NO: 5204 - protein, 529 aa, synthetic construct
  REGION 1..529: note = Variant of terminal deoxynucleotidyltransferase
MHHHHHHGGSGSHGIRTIDSDFGKKQQKKGDNHDSSATYEIKFHEFVLFILEEKMGATRRTFLTDLARKKGFRVENELTDEVTHIVAENLSRSEVLAWLKEHKMEKTKQFELLDISWLIESMKVGKPVDTKGKYQLAESVEVSANPDPTEGRVNELPPTMKTVSPYACQRRTTLNNRNQRFTDSLEILRENYVLKGNVDTALEFRRAISVLKSLPFEVRSLKDTEGLPWISDEVKGIMEEIIEVGESREVQAVLNDEWYQSFHAFTRVFGVGVKTADKWYRMGLRTLEDVRSSKTLKLTTWAKVGLTYYEDLARGVTRAEADAIWLLVQDAVATFDPDAIVEIVGGQRRGKPQSHDVDLLISSPGAEKEQEDQLLQKVMNLWKKQGLLLCGKVVWSQWEWGGLPSGKADELDGEASCFLILKLYDHLVRKSKHNMPTGSNMGESKPWKAIKVDLLRCPRGSFAFAMLQWTGSRMFRRDLRDYAREEKNMMLDNHSLYDMTRGIQLPAKSEEEIFEHLGLEYLEPFERNA

SEQ ID NO: 5205 - DNA, 1587 bp, synthetic construct
  misc_feature 1..1587: note = Variant of terminal deoxynucleotidyltransferase
  source 1..1587: mol_type = other DNA
atgcaccatcatcatcatcatggcggtagcggcagccacggcattcgtaccatcgattcggacttcgggaagaaacagcagaaaaaaggcgataaccacgatagttccgccacttatgaaatcaaatttcacgagtttgtgctgttcattctcgaagaaaaaatgggtgcgacgcgtcgtacttttctgacagatttagcccgcaagaaagggttccgcgtcgagaatgaactgaccgacgaagttacccacatcgtggcagaaaatctgtcacgctctgaagtattggcttggctgaaagaacacaagatggagaagaccaagcaattcgaactgctggatattagctggcttatcgaaagcatgaaagttggtaaaccggtggacaccaaggggaaataccagttggcggaatcggttgaggtgagtgcgaacccagatccgacagaaggtcgtgtaaacgagctgcctcctactatgaaaaccgtttctccgtatgcgtgtcaacgccgcaccaccctgaacaaccgtaatcaacgttttacggactcgctggagattcttcgcgagaattacgtgttcaaaggcaacgatgatactgcgctggaatttcgtcgtgctatctccgtgctgaaaagccttccgtttgaggtacgtagcctgaaagacacggaaggattgccctggatcagtgatgaagtcaaagggattatggaagaaatcatcgaagtcggggagtcgcgtgaagtgcaggccgtgctcaatgatgagtggtatcaaagcttccacgcatttacgcgtgtctttggagtgggggtgaagacagcagacaagtggtaccgcatgggtctgcgcaccctggaggatgttcgttccagcaagaccctgaagttgaccacgtgggcgaaagtaggtctgacgtattatgaagatcttgcgcgcggcgttacccgtgcggaagctgacgcgatttggctgctggttcaggatgcagtcgcaactttcgacccggatgcgatcgtggagattgtcggtggacagcgtcgtgggaaacctcagtctcacgacgttgatctgcttatcagttctccgggagctgaaaaagagcaagaagaccaactcctgcagaaagtgatgaatctgtggaagaaacaagggttgttgctgtgtggtaaagtggtgtggagtcagtgggaatgggggggtctgccgtccggtaaggctgatgagctggacggggaggcatcgtgctttctgatcctcaaactttatgatcatctggtgcgtaaaagtaaacataatatgccgactggttcgaacatgggcgagtccaaaccgtggaaagcaattaaagtagatctgctgcgttgcccccgcggcagttttgcgtttgcgatgttgcagtggaccggaagccgcatgttccgtcgcgatctgcgcgattacgcccgcgaagagaagaacatgatgctggacaatcatagcctgtatgacatgactcgtggtatccaactccctgctaaatcggaagaggaaattttcgaacatctggggcttgaatacctggaaccgttcgaacgtaacgca

SEQ ID NO: 5206 - protein, 529 aa, synthetic construct
  REGION 1..529: note = Variant of terminal deoxynucleotidyltransferase
MHHHHHHGGSGSHGIRTIDSDFGKKQQKKGDNHDSSATYEIKFHEFVLFILEEKMGATRRTFLTDLARKKGFRVENELTDEVTHIVAENLSRSEVLAWLKEHKMEKTKQFELLDISWLIESMKVGKPVDTKGKYQLAESVEVSANPDPTEGRVNELPPTMKTVSPYACQRRTTLNNRNQRFTDSLEILRENYVFKGNDDTALEFRRAISVLKSLPFEVRSLKDTEGLPWISDEVKGIMEEIIEVGESREVQAVLNDEWYQSFHAFTRVFGVGVKTADKWYRMGLRTLEDVRSSKTLKLTTWAKVGLTYYEDLARGVTRAEADAIWLLVQDAVATFDPDAIVEIVGGQRRGKPQSHDVDLLISSPGAEKEQEDQLLQKVMNLWKKQGLLLCGKVVWSQWEWGGLPSGKADELDGEASCFLILKLYDHLVRKSKHNMPTGSNMGESKPWKAIKVDLLRCPRGSFAFAMLQWTGSRMFRRDLRDYAREEKNMMLDNHSLYDMTRGIQLPAKSEEEIFEHLGLEYLEPFERNA

SEQ ID NO: 5207 - DNA, 1587 bp, synthetic construct
  misc_feature 1..1587: note = Variant of terminal deoxynucleotidyltransferase
  source 1..1587: mol_type = other DNA
atgcaccatcatcatcatcatggcggtagcggcagccacggcattcgtaccatcgattcggacttcgggaagaaacagcagaaaaaaggcgataaccacgatagttccgccacttatgaaatcaaatttcacgagtttgtgctgttcattctcgaagaaaaaatgggtgcgacgcgtcgtacttttctgacagatttagcccgcaagaaagggttccgcgtcgagaatgaactgaccgacgaagttacccacatcgtggcagaaaatctgtcacgctctgaagtattggcttggctgaaagaacacaagatggagaagaccaagcaattcgaactgctggatattagctggcttatcgaaagcatgaaagttggtaaaccggtggacaccaaggggaaataccagttggcggaatcggttgaggtgagtgcgaacccagatccgacagaaggtcgtgtaaacgagctgcctcctactatgaaaaccgtttctccgtatgcgtgtcaacgccgcaccaccctgaacaaccgtaatcaacgttttacggactcgctggagattcttcgcgagaattacgtgctgaaaggcaaccaggatactgcgctggaatttcgtcgtgctatctccgtgctgaaaagccttccgtttgaggtacgtagcctgaaagacacggaaggattgccctggatcagtgatgaagtcaaagggattatggaagaaatcatcgaagtcggggagtcgcgtgaagtgcaggccgtgctcaatgatgagtggtatcaaagcttccacgcatttacgcgtgtctttggagtgggggtgaagacagcagacaagtggtaccgcatgggtctgcgcaccctggaggatgttcgttccagcaagaccctgaagttgaccacgtgggcgaaagtaggtctgacgtattatgaagatcttgctcgcggcgttacccgtgcggaagctgacgcgatttggctgctggttcaggatgcagtcgcaactttcgacccggatgcgatcgtggagattgtcggtggacagcgtcgtgggaaacctcagtctcacgacgttgatctgcttatcagttctccgggagctgaaaaagagcaagaagaccaactcctgcagaaagtgatgaatctgtggaagaaacaagggttgttgctgtgtggtaaagtggtgtggagtcagtgggaatgggggggtctgccgtccggtaaggctgatgagggggacggggaggcatcgtgctttctgatcctcaaactttatgatcatctggtgcgtaaaagtaaacataatatgccgactggttcgaacatgggcgagtccaaaccgtggaaagcaattaaagtagatctgctgcgttgcccccgcggcagttttgcgtttgcgatgttgcagtggaccggaagccgcatgttccgtcgcgatctgcgcgattacgcccgcgaagagaagaacatgatgctggacaatcatagcctgtatgacatgactcgtggtatccaactccctgctaaatcggaagaggaaattttcgaacatctggggcttgaatacctggaaccgttcgaacgtaacgca

SEQ ID NO: 5208 - protein, 529 aa, synthetic construct
  REGION 1..529: note = Variant of terminal deoxynucleotidyltransferase
MHHHHHHGGSGSHGIRTIDSDFGKKQQKKGDNHDSSATYEIKFHEFVLFILEEKMGATRRTFLTDLARKKGFRVENELTDEVTHIVAENLSRSEVLAWLKEHKMEKTKQFELLDISWLIESMKVGKPVDTKGKYQLAESVEVSANPDPTEGRVNELPPTMKTVSPYACQRRTTLNNRNQRFTDSLEILRENYVLKGNQDTALEFRRAISVLKSLPFEVRSLKDTEGLPWISDEVKGIMEEIIEVGESREVQAVLNDEWYQSFHAFTRVFGVGVKTADKWYRMGLRTLEDVRSSKTLKLTTWAKVGLTYYEDLARGVTRAEADAIWLLVQDAVATFDPDAIVEIVGGQRRGKPQSHDVDLLISSPGAEKEQEDQLLQKVMNLWKKQGLLLCGKVVWSQWEWGGLPSGKADEGDGEASCFLILKLYDHLVRKSKHNMPTGSNMGESKPWKAIKVDLLRCPRGSFAFAMLQWTGSRMFRRDLRDYAREEKNMMLDNHSLYDMTRGIQLPAKSEEEIFEHLGLEYLEPFERNA

SEQ ID NO: 5209 - DNA, 1587 bp, synthetic construct
  misc_feature 1..1587: note = Variant of terminal deoxynucleotidyltransferase
  source 1..1587: mol_type = other DNA
atgcaccatcatcatcatcatggcggtagcggcagccacggcattcgtaccatcgattcggacttcgggaagaaacagcagaaaaaaggcgataaccacgatagttccgccacttatgaaatcaaatttcacgagtttgtgctgttcattctcgaagaaaaaatgggtgcgacgcgtcgtacttttctgacagatttagcccgcaagaaagggttccgcgtcgagaatgaactgaccgacgaagttacccacatcgtggcagaaaatctgtcacgctctgaagtattggcttggctgaaagaacacaagatggagaagaccaagcaattcgaactgctggatattagctggcttatcgaaagcatgaaagttggtaaaccggtggacaccaaggggaaataccagttggcggaatcggttgaggtgagtgcgaacccagatccgacagaaggtcgtgtaaacgagctgcctcctactatgaaaaccgtttctccgtatgcgtgtcaacgccgcaccaccctgaacaaccgtaatcaacgttttacggactcgctggagattcttcgcgagaattacgtgtttaaaggcaacgacgatactgcgctggaatttcgtcgtgctatctccgtgctgaaaagccttccgtttgaggtacgtagcctgaaagacacggaaggattgccctggatcagtgatgaagtcaaagggattatggaagaaatcatcgaagtcggggagtcgcgtgaagtgcaggccgtgctcaatgatgagtggtatcaaagcttccacgcatttacgcgtgtctttggagtgggggtgatgacagcagacaagtggtaccgcatgggtctgcgcaccctggaggatgttcgttccagcaagaccctgaagttgaccacgtgggcgaaagtaggtctgacgtattatgaagatcttgctcgcggcgttacccgtgcggaagctgacgcgatttggctgctggttcaggatgcagtcgcaactttcgacccggatgcgatcgtggagattgtcggtggacagcgtcgtgggaaacctcagtctcacgacgttgatctgcttatcagttctccgggagctgaaaaagagcaagaagaccaactcctgcagaaagtgatgaatctgtggaagaaacaagggttgttgctgtgtggtaaagtggtgtggagtcagtgggaatgggggggtctgccgtccggtaaggctgatgagggtgacggggaggcatcgtgctttctgatcctcaaactttatgatcatctggtgcgtaaaagtaaacataatatgccgactggttcgaacatgggcgagtccaaaccgtggaaagcaattaaagtagatctgctgcgttgcccccgcggcagttttgcgtttgcgatgttgcagtggaccggaagccgcatgttccgtcgcgatctgcgcgattacgcccgcgaagagaagaacatgatgctggacaatcatagcctgtatgacatgactcgtggtatccaactccctgctaaatcggaagaggaaattttcgaacatctggggcttgaatacctgaccccgttcgaacgtaacgca

SEQ ID NO: 5210 - protein, 529 aa, synthetic construct
  REGION 1..529: note = Variant of terminal deoxynucleotidyltransferase
MHHHHHHGGSGSHGIRTIDSDFGKKQQKKGDNHDSSATYEIKFHEFVLFILEEKMGATRRTFLTDLARKKGFRVENELTDEVTHIVAENLSRSEVLAWLKEHKMEKTKQFELLDISWLIESMKVGKPVDTKGKYQLAESVEVSANPDPTEGRVNELPPTMKTVSPYACQRRTTLNNRNQRFTDSLEILRENYVFKGNDDTALEFRRAISVLKSLPFEVRSLKDTEGLPWISDEVKGIMEEIIEVGESREVQAVLNDEWYQSFHAFTRVFGVGVMTADKWYRMGLRTLEDVRSSKTLKLTTWAKVGLTYYEDLARGVTRAEADAIWLLVQDAVATFDPDAIVEIVGGQRRGKPQSHDVDLLISSPGAEKEQEDQLLQKVMNLWKKQGLLLCGKVVWSQWEWGGLPSGKADEGDGEASCFLILKLYDHLVRKSKHNMPTGSNMGESKPWKAIKVDLLRCPRGSFAFAMLQWTGSRMFRRDLRDYAREEKNMMLDNHSLYDMTRGIQLPAKSEEEIFEHLGLEYLTPFERNA

SEQ ID NO: 5211 - DNA, 1587 bp, synthetic construct
  misc_feature 1..1587: note = Variant of terminal deoxynucleotidyltransferase
  source 1..1587: mol_type = other DNA
atgcaccatcatcatcatcatggcggtagcggcagccacggcattcgtaccatcgattcggacttcgggaagaaacagcagaaaaaaggcgataaccacgatagttccgccacttatgaaatcaaatttcacgagtttgtgctgttcattctcgaagaaaaaatgggtgcgacgcgtcgtacttttctgacagatttagcccgcaagaaagggttccgcgtcgagaatgaactgaccgacgaagttacccacatcgtggcagaaaatctgtcacgctctgaagtattggcttggctgaaagaacacaagatggagaagaccaagcaattcgaactgctggatattagctggcttatcgaaagcatgaaagttggtaaaccggtggacaccaaggggaaataccagttggcggaatcggttgaggtgagtgcgaacccagatccgacagaaggtcgtgtaaacgagctgcctcctactatgaaaaccgtttctccgtatgcgtgtcaacgccgcaccaccctgaacaaccgtaatcaacgttttacggactcgctggagattcttcgcgagaattacgtgtggaaaggcaacgatgatactgcgctggaatttcgtcgtgctatctccgtgctgaaaagccttccgtttgaggtacgtagcctgaaagacacggaaggattgccctggatcagtgatgaagtcaaagggattatggaagaaatcatcgaagtcggggagtcgcgtgaagtgcaggccgtgctcaatgatgagtggtatcaaagcttccacgcatttacgcgtgtctttggagtgggggtgaagacagcagacaagtggtaccgcatgggtctgcgcaccctggaggatgttcgttccagcaagaccctgaagttgaccacgtgggcgaaagtaggtctgacgtattacgaagatcttagtcgcggcgttacccgtgcggaagctgacgcgatttggctgctggttcaggatgcagtcgcaactttcgacccggatgcgatcgtggagattgtcggtggacagcgtcgtgggaaacctcagtctcacgacgttgatctgcttatcagttctccgggagctgaaaaagagcaagaagaccaactcctgcagaaagtgatgaatctgtggaagaaacaagggttgttgctgtgtggtaaagtggtgtggagtcagtgggaatgggggggtctgccgtccggtaaggctgatgagggggacggggaggcatcgtgctttctgatcctcaaactttatgatcatctggtgcgtaaaagtaaacataatatgccgactggttcgaacatgggcgagtccaaaccgtggaaagcaattaaagtagatctgctgcgttgcccccgcggcagttttgcgtttgcgatgttgcagtggaccggaagccgcatgttccgtcgcgatctgcgcgattacgcccgcgaagagaagaacatgatgctggacaatcatagcctgtatgacatgactcgtggtatccaactccctgctaaatcggaagaggaaattttcgaacatctggggcttgaatacctggaaccgttcgaacgtaacgca

SEQ ID NO: 5212 - protein, 529 aa, synthetic construct
  REGION 1..529: note = Variant of terminal deoxynucleotidyltransferase
MHHHHHHGGSGSHGIRTIDSDFGKKQQKKGDNHDSSATYEIKFHEFVLFILEEKMGATRRTFLTDLARKKGFRVENELTDEVTHIVAENLSRSEVLAWLKEHKMEKTKQFELLDISWLIESMKVGKPVDTKGKYQLAESVEVSANPDPTEGRVNELPPTMKTVSPYACQRRTTLNNRNQRFTDSLEILRENYVWKGNDDTALEFRRAISVLKSLPFEVRSLKDTEGLPWISDEVKGIMEEIIEVGESREVQAVLNDEWYQSFHAFTRVFGVGVKTADKWYRMGLRTLEDVRSSKTLKLTTWAKVGLTYYEDLSRGVTRAEADAIWLLVQDAVATFDPDAIVEIVGGQRRGKPQSHDVDLLISSPGAEKEQEDQLLQKVMNLWKKQGLLLCGKVVWSQWEWGGLPSGKADEGDGEASCFLILKLYDHLVRKSKHNMPTGSNMGESKPWKAIKVDLLRCPRGSFAFAMLQWTGSRMFRRDLRDYAREEKNMMLDNHSLYDMTRGIQLPAKSEEEIFEHLGLEYLEPFERNA

SEQ ID NO: 5213 - DNA, 1587 bp, synthetic construct
  misc_feature 1..1587: note = Variant of terminal deoxynucleotidyltransferase
  source 1..1587: mol_type = other DNA
atgcaccatcatcatcatcatggcggtagcggcagccacggcattcgtaccatcgattcggacttcgggaagaaacagcagaaaaaaggcgataaccacgatagttccgccacttatgaaatcaaatttcacgagtttgtgctgttcattctcgaagaaaaaatgggtgcgacgcgtcgtacttttctgacagatttagcccgcaagaaagggttccgcgtcgagaatgaactgaccgacgaagttacccacatcgtggcagaaaatctgtcacgctctgaagtattggcttggctgaaagaacacaagatggagaagaccaagcaattcgaactgctggatattagctggcttatcgaaagcatgaaagttggtaaaccggtggacaccaaggggaaataccagttggcggaatcggttgaggtgagtgcgaacccagatccgacagaaggtcgtgtaaacgagctgcctcctactatgaaaaccgtttctccgtatgcgtgtcaacgccgcaccaccctgaacaaccgtaatcaacgttttacggactcgctggagattcttcgcgagaattacgtgttcaaaggcaaccaggatactgcgctggaatttcgtcgtgctagttccgtgctgaaaagccttccgtttgaggtacgtagcctgaaagacacggaaggattgccctggatcagtgatgaagtcaaagggattatggaagaaatcatcgaagtcggggagtcgcgtgaagtgcaggccgtgctcaatgatgagtggtatcaaagcttccacgcatttacgcgtgtctttggagtgggggtgaagacagcagacaagtggtaccgcatgggtctgcgcaccctggaggatgttcgttccagcaagaccctgaagttgaccacgtgggcgaaagtaggtctgacgtattacgaagatcttagtcgcggcgttacccgtgcggaagctgacgcgatttggctgctggttcaggatgcagtcgcaactttcgacccggatgcgatcgtggagattgtcggtggacagcgtcgtgggaaacctcagtctcacgacgttgatctgcttatcagttctccgggagctgaaaaagagcaagaagaccaactcctgcagaaagtgatgaatctgtggaagaaacaagggttgttgctgtgtggtaaagtggtgtggagtcagtgggaatgggggggtctgccgtccggtaaggctgatgagctggacggggaggcatcgtgctttctgatcctcaaactttatgatcatctggtgcgtaaaagtaaacataatatgccgactggttcgaacatgggcgagtccaaaccgtggaaagcaattaaagtagatctgctgcgttgcccccgcggcagttttgcgtttgcgatgttgcagtggaccggaagccgcatgttccgtcgcgatctgcgcgattacgcccgcgaagagaagaacatgatgctggacaatcatagcctgtatgacatgactcgtggtatccaactccctgctaaatcggaagaggaaattttcgaacatctggggcttgaatacctggaaccgttcgaacgtaacgca

SEQ ID NO: 5214 - protein, 529 aa, synthetic construct
  REGION 1..529: note = Variant of terminal deoxynucleotidyltransferase
MHHHHHHGGSGSHGIRTIDSDFGKKQQKKGDNHDSSATYEIKFHEFVLFILEEKMGATRRTFLTDLARKKGFRVENELTDEVTHIVAENLSRSEVLAWLKEHKMEKTKQFELLDISWLIESMKVGKPVDTKGKYQLAESVEVSANPDPTEGRVNELPPTMKTVSPYACQRRTTLNNRNQRFTDSLEILRENYVFKGNQDTALEFRRASSVLKSLPFEVRSLKDTEGLPWISDEVKGIMEEIIEVGESREVQAVLNDEWYQSFHAFTRVFGVGVKTADKWYRMGLRTLEDVRSSKTLKLTTWAKVGLTYYEDLSRGVTRAEADAIWLLVQDAVATFDPDAIVEIVGGQRRGKPQSHDVDLLISSPGAEKEQEDQLLQKVMNLWKKQGLLLCGKVVWSQWEWGGLPSGKADELDGEASCFLILKLYDHLVRKSKHNMPTGSNMGESKPWKAIKVDLLRCPRGSFAFAMLQWTGSRMFRRDLRDYAREEKNMMLDNHSLYDMTRGIQLPAKSEEEIFEHLGLEYLEPFERNA

SEQ ID NO: 5215 - DNA, 1587 bp, synthetic construct
  misc_feature 1..1587: note = Variant of terminal deoxynucleotidyltransferase
  source 1..1587: mol_type = other DNA
atgcaccatcatcatcatcatggcggtagcggcagccacggcattcgtaccatcgattcggacttcgggaagaaacagcagaaaaaaggcgataaccacgatagttccgccacttatgaaatcaaatttcacgagtttgtgctgttcattctcgaagaaaaaatgggtgcgacgcgtcgtacttttctgacagatttagcccgcaagaaagggttccgcgtcgagaatgaactgaccgacgaagttacccacatcgtggcagaaaatctgtcacgctctgaagtattggcttggctgaaagaacacaagatggagaagaccaagcaattcgaactgctggatattagctggcttatcgaaagcatgaaagttggtaaaccggtggacaccaaggggaaataccagttggcggaatcggttgaggtgagtgcgaacccagatccgacagaaggtcgtgtaaacgagctgcctcctactatgaaaaccgtttctccgtatgcgtgtcaacgccgcaccaccctgaacaaccgtaatcaacgttttacggactcgctggagattcttcgcgagaattacgtgctgaaaggcaacgatgatactgcgctggaatttcgtcgtgctatctccgtgctgaaaagccttccgtttgaggtacgtagcctgaaagacacggaaggattgccctggatcagtgatgaagtcaaagggattatggaagaaatcatcgaagtcggggagtcgcgtgaagtgcaggccgtgctcaatgatgagtggtatcaaagcttccacgcatttacgcgtgtctttggagtgggggtgaagacagcagacaagtggtaccgcatgggtctgcgcaccctggaggatgttcgttccagcaagaccctgaagttgaccacgtgggcgaaagtaggtctgacgtattatgaagatcttgctcgcggcgttacccgtgcggaagctgacgcgatttggctgctggttcaggatgcagtcgcaactttcgacccggatgcgatcgtggagattgtcggtggacagcgtcgtgggaaacctcagtctcacgacgttgatctgcttatcagttctccgggagctgaaaaagagcaagaagaccaactcctgcagaaagtgatgaatctgtggaagaaacaagggttgttgctgtgtggtaaagtggtgtggagtcagtgggaatgggggggtctgccgtccggtaaggctgatgagggggacggggaggcatcgtgctttctgatcctcaaactttatgatcatctggtgcgtaaaagtaaacataatatgccgactggttcgaacatgggcgagtccaaaccgtggaaagcaattaaagtagatctgctgcgttgcccccgcggcagttttgcgtttgcgatgttgcagtggaccggaagccgcatgttccgtcgcgatctgcgcgattacgcccgcgaagagaagaacatgatgctggacaatcatagcctgtatgacatgactcgtggtatccaactccctgctaaatcggaagaggaaattttcgaacatctggggcttgaatacctggaaccgttcgaacgtaacgca

SEQ ID NO: 5216 - protein, 529 aa, synthetic construct
  REGION 1..529: note = Variant of terminal deoxynucleotidyltransferase
MHHHHHHGGSGSHGIRTIDSDFGKKQQKKGDNHDSSATYEIKFHEFVLFILEEKMGATRRTFLTDLARKKGFRVENELTDEVTHIVAENLSRSEVLAWLKEHKMEKTKQFELLDISWLIESMKVGKPVDTKGKYQLAESVEVSANPDPTEGRVNELPPTMKTVSPYACQRRTTLNNRNQRFTDSLEILRENYVLKGNDDTALEFRRAISVLKSLPFEVRSLKDTEGLPWISDEVKGIMEEIIEVGESREVQAVLNDEWYQSFHAFTRVFGVGVKTADKWYRMGLRTLEDVRSSKTLKLTTWAKVGLTYYEDLARGVTRAEADAIWLLVQDAVATFDPDAIVEIVGGQRRGKPQSHDVDLLISSPGAEKEQEDQLLQKVMNLWKKQGLLLCGKVVWSQWEWGGLPSGKADEGDGEASCFLILKLYDHLVRKSKHNMPTGSNMGESKPWKAIKVDLLRCPRGSFAFAMLQWTGSRMFRRDLRDYAREEKNMMLDNHSLYDMTRGIQLPAKSEEEIFEHLGLEYLEPFERNA

SEQ ID NO: 5217 - DNA, 1587 bp, synthetic construct
  misc_feature 1..1587: note = Variant of terminal deoxynucleotidyltransferase
  source 1..1587: mol_type = other DNA
atgcaccatcatcatcatcatggcggtagcggcagccacggcattcgtaccatcgattcggacttcgggaagaaacagcagaaaaaaggcgataaccacgatagttccgccacttatgaaatcaaatttcacgagtttgtgctgttcattctcgaagaaaaaatgggtgcgacgcgtcgtacttttctgacagatttagcccgcaagaaagggttccgcgtcgagaatgaactgaccgacgaagttacccacatcgtggcagaaaatctgtcacgctctgaagtattggcttggctgaaagaacacaagatggagaagaccaagcaattcgaactgctggatattagctggcttatcgaaagcatgaaagttggtaaaccggtggacaccaaggggaaataccagttggcggaatcggttgaggtgagtgcgaacccagatccgacagaaggtcgtgtaaacgagctgcctcctactatgaaaaccgtttctccgtatgcgtgtcaacgccgcaccaccctgaacaaccgtaatcaacgttttacggactcgctggagattcttcgcgagaattacgtgtggaaaggcaacgatgatactgcgctggaatttcgtcgtgctatctccgtgctgaaaagccttccgtttgaggtacgtagcctgaaagacacggaaggattgccctggatcagtgatgaagtcaaagggattatggaagaaatcatcgaagtcggggagtcgcgtgaagtgcaggccgtgctcaatgatgagtggtatcaaagcttccacgcatttacgcgtgtctttggagtgggggtgaagacagcagacaagtggtaccgcatgggtctgcgcaccctggaggatgttcgttccagcaagaccctgaagttgaccacgtgggcgaaagtaggtctgacgtattatgaagatcttgctcgcggcgttacccgtgcggaagctgacgcgatttggctgctggttcaggatgcagtcgcaactttcgacccggatgcgatcgtggagattgtcggtggacagcgtcgtgggaaacctcagtctcacgacgttgatctgcttatcagttctccgggagctgaaaaagagcaagaagaccaactcctgcagaaagtgatgaatctgtggaagaaacaagggttgttgctgtgtggtaaagtggtgtggagtcagtgggaatgggggggtctgccgtccggtaaggctgatgagctggacggggaggcatcgtgctttctgatcctcaaactttatgatcatctggtgcgtaaaagtaaacataatatgccgactggttcgaacatgggcgagtccaaaccgtggaaagcaattaaagtagatctgctgcgttgcccccgcggcagttttgcgtttgcgatgttgcagtggaccggaagccgcatgttccgtcgcgatctgcgcgattacgcccgcgaagagaagaacatgatgctggacaatcatagcctgtatgacatgactcgtggtatccaactccctgctaaatcggaagaggaaattttcgaacatctggggcttgaatacctggaaccgttcgaacgtaacgca

SEQ ID NO: 5218 - protein, 529 aa, synthetic construct
  REGION 1..529: note = Variant of terminal deoxynucleotidyltransferase
MHHHHHHGGSGSHGIRTIDSDFGKKQQKKGDNHDSSATYEIKFHEFVLFILEEKMGATRRTFLTDLARKKGFRVENELTDEVTHIVAENLSRSEVLAWLKEHKMEKTKQFELLDISWLIESMKVGKPVDTKGKYQLAESVEVSANPDPTEGRVNELPPTMKTVSPYACQRRTTLNNRNQRFTDSLEILRENYVWKGNDDTALEFRRAISVLKSLPFEVRSLKDTEGLPWISDEVKGIMEEIIEVGESREVQAVLNDEWYQSFHAFTRVFGVGVKTADKWYRMGLRTLEDVRSSKTLKLTTWAKVGLTYYEDLARGVTRAEADAIWLLVQDAVATFDPDAIVEIVGGQRRGKPQSHDVDLLISSPGAEKEQEDQLLQKVMNLWKKQGLLLCGKVVWSQWEWGGLPSGKADELDGEASCFLILKLYDHLVRKSKHNMPTGSNMGESKPWKAIKVDLLRCPRGSFAFAMLQWTGSRMFRRDLRDYAREEKNMMLDNHSLYDMTRGIQLPAKSEEEIFEHLGLEYLEPFERNA

SEQ ID NO: 5219 - DNA, 1587 bp, synthetic construct
  misc_feature 1..1587: note = Variant of terminal deoxynucleotidyltransferase
  source 1..1587: mol_type = other DNA
atgcaccatcatcatcatcatggcggtagcggcagccacggcattcgtaccatcgattcggacttcgggaagaaacagcagaaaaaaggcgataaccacgatagttccgccacttatgaaatcaaatttcacgagtttgtgctgttcattctcgaagaaaaaatgggtgcgacgcgtcgtacttttctgacagatttagcccgcaagaaagggttccgcgtcgagaatgaactgaccgacgaagttacccacatcgtggcagaaaatctgtcacgctctgaagtattggcttggctgaaagaacacaagatggagaagaccaagcaattcgaactgctggatattagctggcttatcgaaagcatgaaagttggtaaaccggtggacaccaaggggaaataccagttggcggaatcggttgaggtgagtgcgaacccagatccgacagaaggtcgtgtaaacgagctgcctcctactatgaaaaccgtttctccgtatgcgtgtcaacgccgcaccaccctgaacaaccgtaatcaacgttttacggactcgctggagattcttcgcgagaattacgtgtttaaaggcaacgacgatactgcgctggaatttcgtcgtgctatctccgtgctgaaaagccttccgtttgaggtacgtagcctgaaagacacggaaggattgccctggatcagtgatgaagtcaaagggattatggaagaaatcatcgaagtcggggagtcgcgtgaagtgcaggccgtgctcaatgatgagtggtatcaaagcttccacgcatttacgcgtgtctttggagtgggggtgaagacagcagacaagtggtaccgcatgggtctgcgcaccctggaggatgttcgttccagcaagaccctgaagttgaccacgtgggcgaaagtaggtctgacgtattatgaagatcttgctcgcggcgttacccgtgcggaagctgacgcgatgtggctgctggttcaggatgcagtcgcaactttcgacccggatgcgatcgtggagattgtcggtggacagcgtcgtgggaaacctcagtctcacgacgttgatctgcttatcagttctccgggagctgaaaaagagcaagaagaccaactcctgcagaaagtgatgaatctgtggaagaaacaagggttgttgctgtgtggtaaagtggtgtggagtcagtgggaatgggggggtctgccgtccggtaaggctgatgagggtgacggggaggcatcgtgctttctgatcctcaaactttatgatcatctggtgcgtaaaagtaaacataatatgccgactggttcgaacatgggcgagtccaaaccgtggaaagcaattaaagtagatctgctgcgttgcccccgcggcagttttgcgtttgcgatgttgcagtggaccggaagccgcatgttccgtcgcgatctgcgcgattacgcccgcgaagagaagaacatgatgctggacaatcatagcctgtatgacatgactcgtggtatccaactccctgctaaatcggaagaggaaattttcgaacatctggggcttgaatacctggaaccgttctatcgtaacgca

SEQ ID NO: 5220 - protein, 529 aa, synthetic construct
  REGION 1..529: note = Variant of terminal deoxynucleotidyltransferase
MHHHHHHGGSGSHGIRTIDSDFGKKQQKKGDNHDSSATYEIKFHEFVLFILEEKMGATRRTFLTDLARKKGFRVENELTDEVTHIVAENLSRSEVLAWLKEHKMEKTKQFELLDISWLIESMKVGKPVDTKGKYQLAESVEVSANPDPTEGRVNELPPTMKTVSPYACQRRTTLNNRNQRFTDSLEILRENYVFKGNDDTALEFRRAISVLKSLPFEVRSLKDTEGLPWISDEVKGIMEEIIEVGESREVQAVLNDEWYQSFHAFTRVFGVGVKTADKWYRMGLRTLEDVRSSKTLKLTTWAKVGLTYYEDLARGVTRAEADAMWLLVQDAVATFDPDAIVEIVGGQRRGKPQSHDVDLLISSPGAEKEQEDQLLQKVMNLWKKQGLLLCGKVVWSQWEWGGLPSGKADEGDGEASCFLILKLYDHLVRKSKHNMPTGSNMGESKPWKAIKVDLLRCPRGSFAFAMLQWTGSRMFRRDLRDYAREEKNMMLDNHSLYDMTRGIQLPAKSEEEIFEHLGLEYLEPFYRNA

SEQ ID NO: 5221 - DNA, 1587 bp, synthetic construct
  misc_feature 1..1587: note = Variant of terminal deoxynucleotidyltransferase
  source 1..1587: mol_type = other DNA
atgcaccatcatcatcatcatggcggtagcggcagccacggcattcgtaccatcgattcggacttcgggaagaaacagcagaaaaaaggcgataaccacgatagttccgccacttatgaaatcaaatttcacgagtttgtgctgttcattctcgaagaaaaaatgggtgcgacgcgtcgtacttttctgacagatttagcccgcaagaaagggttccgcgtcgagaatgaactgaccgacgaagttacccacatcgtggcagaaaatctgtcacgctctgaagtattggcttggctgaaagaacacaagatggagaagaccaagcaattcgaactgctggatattagctggcttatcgaaagcatgaaagttggtaaaccggtggacaccaaggggaaataccagttggcggaatcggttgaggtgagtgcgaacccagatccgacagaaggtcgtgtaaacgagctgcctcctactatgaaaaccgtttctccgtatgcgtgtcaacgccgcaccaccctgaacaaccgtaatcaacgttttacggactcgctggagattcttcgcgagaattacgtgtggaaaggcaacgtggatactgcgctggaatttcgtcgtgctatctccgtgctgaaaagccttccgtttgaggtacgtagcctgaaagacacggaaggattgccctggatcagtgatgaagtcaaagggattatggaagaaatcatcgaagtcggggagtcgcgtgaagtgcaggccgtgctcaatgatgagtggtatcaaagcttccacgcatttacgcgtgtctttggagtgggggtgaagacagcagacaagtggtaccgcatgggtctgcgcaccctggaggatgttcgttccagcaagaccctgaagttgaccacgtgggcgaaagtaggtctgacgtattacgaagatcttagtcgcggcgttacccgtgcggaagctgacgcgatttggctgctggttcaggatgcagtcgcaactttcgacccggatgcgatcgtggagattgtcggtggacagcgtcgtgggaaacctcagtctcacgacgttgatctgcttatcagttctccgggagctgaaaaagagcaagaagaccaactcctgcagaaagtgatgaatctgtggaagaaacaagggttgttgctgtgtggtaaagtggtgtggagtcagtgggaatgggggggtctgccgtccggtaaggctgatgagggggacggggaggcatcgtgctttctgatcctcaaactttatgatcatctggtgcgtaaaagtaaacataatatgccgactggttcgaacatgggcgagtccaaaccgtggaaagcaattaaagtagatctgctgcgttgcccccgcggcagttttgcgtttgcgatgttgcagtggaccggaagccgcatgttccgtcgcgatctgcgcgattacgcccgcgaagagaagaacatgatgctggacaatcatagcctgtatgacatgactcgtggtatccaactccctgctaaatcggaagaggaaattttcgaacatctggggcttgaatacctggaaccgttcgaacgtaacgca

SEQ ID NO: 5222 - protein, 529 aa, synthetic construct
  REGION 1..529: note = Variant of terminal deoxynucleotidyltransferase
MHHHHHHGGSGSHGIRTIDSDFGKKQQKKGDNHDSSATYEIKFHEFVLFILEEKMGATRRTFLTDLARKKGFRVENELTDEVTHIVAENLSRSEVLAWLKEHKMEKTKQFELLDISWLIESMKVGKPVDTKGKYQLAESVEVSANPDPTEGRVNELPPTMKTVSPYACQRRTTLNNRNQRFTDSLEILRENYVWKGNVDTALEFRRAISVLKSLPFEVRSLKDTEGLPWISDEVKGIMEEIIEVGESREVQAVLNDEWYQSFHAFTRVFGVGVKTADKWYRMGLRTLEDVRSSKTLKLTTWAKVGLTYYEDLSRGVTRAEADAIWLLVQDAVATFDPDAIVEIVGGQRRGKPQSHDVDLLISSPGAEKEQEDQLLQKVMNLWKKQGLLLCGKVVWSQWEWGGLPSGKADEGDGEASCFLILKLYDHLVRKSKHNMPTGSNMGESKPWKAIKVDLLRCPRGSFAFAMLQWTGSRMFRRDLRDYAREEKNMMLDNHSLYDMTRGIQLPAKSEEEIFEHLGLEYLEPFERNA

SEQ ID NO: 5223 - DNA, 1587 bp, synthetic construct
  misc_feature 1..1587: note = Variant of terminal deoxynucleotidyltransferase
  source 1..1587: mol_type = other DNA
atgcaccatcatcatcatcatggcggtagcggcagccacggcattcgtaccatcgattcggacttcgggaagaaacagcagaaaaaaggcgataaccacgatagttccgccacttatgaaatcaaatttcacgagtttgtgctgttcattctcgaagaaaaaatgggtgcgacgcgtcgtacttttctgacagatttagcccgcaagaaagggttccgcgtcgagaatgaactgaccgacgaagttacccacatcgtggcagaaaatctgtcacgctctgaagtattggcttggctgaaagaacacaagatggagaagaccaagcaattcgaactgctggatattagctggcttatcgaaagcatgaaagttggtaaaccggtggacaccaaggggaaataccagttggcggaatcggttgaggtgagtgcgaacccagatccgacagaaggtcgtgtaaacgagctgcctcctactatgaaaaccgtttctccgtatgcgtgtcaacgccgcaccaccctgaacaaccgtaatcaacgttttacggactcgctggagattcttcgcgagaattacgtgtttaaaggcaacgacgatactgcgctggaatttcgtcgtgctatctccgtgctgaaaagccttccgtttgaggtacgtagcctgaaagacacggaaggattgccctggatcagtgatgaagtcaaagggattatggaagaaatcatcgaagtcggggagtcgcgtgaagtgcaggccgtgctcaatgatgagtggtatcaaagcttccacgcatttacgcgtgtctttggagtgggggtgaagacagcagacaagtggtaccgcatgggtctgcgcaccctggaggatgttcgttccagcaagaccctgaagttgaccacgtgggcgaaagtaggtctgacgtattatgaagatcttgctcgcggcgttacccgtgcggaagctgacgcgatttggctgctggttcaggatgcagtcgcaactttcgacccggatgcgatcgtggagattgtcggtggacagcgtcgtgggaaacctcagtctcacgacgttgatctgcttatcagttctccgggagctgaaaaagagcaagaagaccaactcctgcagaaagtgatgaatctgtggaagaaacaagggttgttgctgtgtggtaaagtggtgtggagtcagtgggaatgggggggtctgccgtccggtaaggctgatgagggtgacggggaggcatcgtgctttctgatcctcaaactttatgatcatctggtgcgtaaaagtaaacataatatgccgactggttcgaacatgggcgagtccaaaccgtggaaagcaattaaagtagatctgctgcgttgcccccgcggcagttttgcgtttgcggtgttgcagtggaccggaagccgcatgttccgtcgcgatctgcgcgattacgcccgcgaagagaagaacatgatgctggacaatcatagcctgtatgacatgactcgtggtatccaactccctgctaaatcggaagaggaaattttcgaacatctggggcttgaatacctggaaccgttcgaacgtaacgca

SEQ ID NO: 5224 - protein, 529 aa, synthetic construct
  REGION 1..529: note = Variant of terminal deoxynucleotidyltransferase
MHHHHHHGGSGSHGIRTIDSDFGKKQQKKGDNHDSSATYEIKFHEFVLFILEEKMGATRRTFLTDLARKKGFRVENELTDEVTHIVAENLSRSEVLAWLKEHKMEKTKQFELLDISWLIESMKVGKPVDTKGKYQLAESVEVSANPDPTEGRVNELPPTMKTVSPYACQRRTTLNNRNQRFTDSLEILRENYVFKGNDDTALEFRRAISVLKSLPFEVRSLKDTEGLPWISDEVKGIMEEIIEVGESREVQAVLNDEWYQSFHAFTRVFGVGVKTADKWYRMGLRTLEDVRSSKTLKLTTWAKVGLTYYEDLARGVTRAEADAIWLLVQDAVATFDPDAIVEIVGGQRRGKPQSHDVDLLISSPGAEKEQEDQLLQKVMNLWKKQGLLLCGKVVWSQWEWGGLPSGKADEGDGEASCFLILKLYDHLVRKSKHNMPTGSNMGESKPWKAIKVDLLRCPRGSFAFAVLQWTGSRMFRRDLRDYAREEKNMMLDNHSLYDMTRGIQLPAKSEEEIFEHLGLEYLEPFERNA

SEQ ID NO: 5225 - DNA, 1587 bp, synthetic construct
  misc_feature 1..1587: note = Variant of terminal deoxynucleotidyltransferase
  source 1..1587: mol_type = other DNA
atgcaccatcatcatcatcatggcggtagcggcagccacggcattcgtaccatcgattcggacttcgggaagaaacagcagaaaaaaggcgataaccacgatagttccgccacttatgaaatcaaatttcacgagtttgtgctgttcattctcgaagaaaaaatgggtgcgacgcgtcgtacttttctgacagatttagcccgcaagaaagggttccgcgtcgagaatgaactgaccgacgaagttacccacatcgtggcagaaaatctgtcacgctctgaagtattggcttggctgaaagaacacaagatggagaagaccaagcaattcgaactgctggatattagctggcttatcgaaagcatgaaagttggtaaaccggtggacaccaaggggaaataccagttggcggaatcggttgaggtgagtgcgaacccagatccgacagaaggtcgtgtaaacgagctgcctcctactatgaaaaccgtttctccgtatgcgtgtcaacgccgcaccaccctgaacaaccgtaatcaacgttttacggactcgctggagattcttcgcgagaattacgtgctgaaaggcaacgtggatactgcgctggaatttcgtcgtgctatctccgtgctgaaaagccttccgtttgaggtacgtagcctgaaagacacggaaggattgccctggatcagtgatgaagtcaaagggattatggaagaaatcatcgaagtcggggagtcgcgtgaagtgcaggccgtgctcaatgatgagtggtatcaaagcttccacgcatttacgcgtgtctttggagtgggggtgaagacagcagacaagtggtaccgcatgggtctgcgcaccctggaggatgttcgttccagcaagaccctgaagttgaccacgtgggcgaaagtaggtctgacgtatcgtgaagatcttgcgcgcggcgttacccgtgcggaagctgacgcgatttggctgctggttcaggatgcagtcgcaactttcgacccggatgcgatcgtggagattgtcggtggacagcgtcgtgggaaacctcagtctcacgacgttgatctgcttatcagttctccgggagctgaaaaagagcaagaagaccaactcctgcagaaagtgatgaatctgtggaagaaacaagggttgttgctgtgtggtaaagtggtgtggagtcagtgggaatgggggggtctgccgtccggtaaggctgatgagggggacggggaggcatcgtgctttctgatcctcaaactttatgatcatctggtgcgtaaaagtaaacataatatgccgactggttcgaacatgggcgagtccaaaccgtggaaagcaattaaagtagatctgctgcgttgcccccgcggcagttttgcgtttgcgatgttgcagtggaccggaagccgcatgttccgtcgcgatctgcgcgattacgcccgcgaagagaagaacatgatgctggacaatcatagcctgtatgacatgactcgtggtatccaactccctgctaaatcggaagaggaaattttcgaacatctggggcttgaatacctggaaccgttcgaacgtaacgca

SEQ ID NO: 5226 - protein, 529 aa, synthetic construct
  REGION 1..529: note = Variant of terminal deoxynucleotidyltransferase
MHHHHHHGGSGSHGIRTIDSDFGKKQQKKGDNHDSSATYEIKFHEFVLFILEEKMGATRRTFLTDLARKKGFRVENELTDEVTHIVAENLSRSEVLAWLKEHKMEKTKQFELLDISWLIESMKVGKPVDTKGKYQLAESVEVSANPDPTEGRVNELPPTMKTVSPYACQRRTTLNNRNQRFTDSLEILRENYVLKGNVDTALEFRRAISVLKSLPFEVRSLKDTEGLPWISDEVKGIMEEIIEVGESREVQAVLNDEWYQSFHAFTRVFGVGVKTADKWYRMGLRTLEDVRSSKTLKLTTWAKVGLTYREDLARGVTRAEADAIWLLVQDAVATFDPDAIVEIVGGQRRGKPQSHDVDLLISSPGAEKEQEDQLLQKVMNLWKKQGLLLCGKVVWSQWEWGGLPSGKADEGDGEASCFLILKLYDHLVRKSKHNMPTGSNMGESKPWKAIKVDLLRCPRGSFAFAMLQWTGSRMFRRDLRDYAREEKNMMLDNHSLYDMTRGIQLPAKSEEEIFEHLGLEYLEPFERNA

SEQ ID NO: 5227 - DNA, 1587 bp, synthetic construct
  misc_feature 1..1587: note = Variant of terminal deoxynucleotidyltransferase
  source 1..1587: mol_type = other DNA
atgcaccatcatcatcatcatggcggtagcggcagccacggcattcgtaccatcgattcggacttcgggaagaaacagcagaaaaaaggcgataaccacgatagttccgccacttatgaaatcaaatttcacgagtttgtgctgttcattctcgaagaaaaaatgggtgcgacgcgtcgtacttttctgacagatttagcccgcaagaaagggttccgcgtcgagaatgaactgaccgacgaagttacccacatcgtggcagaaaatctgtcacgctctgaagtattggcttggctgaaagaacacaagatggagaagaccaagcaattcgaactgctggatattagctggcttatcgaaagcatgaaagttggtaaaccggtggacaccaaggggaaataccagttggcggaatcggttgaggtgagtgcgaacccagatccgacagaaggtcgtgtaaacgagctgcctcctactatgaaaaccgtttctccgtatgcgtgtcaacgccgcaccaccctgaacaaccgtaatcaacgttttacggactcgctggagattcttcgcgagaattacgtgtttaaaggcaacgacgatactgcgctggaatttcgtcgtgctatctccgtgctgaaaagccttccgtttgaggtacgtagcctgaaagacacggaaggattgccctggatcagtgatgaagtcaaagggattatggaagaaatcatcgaagtcggggagtcgcgtgaagtgcaggccgtgctcaatgatgagtggtatcaaagcttccacgcatttacgcgtgtctttggagtgggggtgaagacagcagacaagtggtaccgcatgggtctgcgcaccctggaggatgttcgttccagcaagaccctgaagttgaccacgtgggcgaaagtaggtctgacgtattatgaagatcttgctcgcggcgttacccgtgcggaagctgacgcgatttggctgctggttcaggatgcagtcgcaactttcgacccggatgcgatcgtggagattgtcggtggacagcgtcgtgggaaacctcagtctcacgacgttgatctgcttatcagttctccgggagctgaaaaagagcaagaagaccaactcctgcagaaagtgatgaatctgtggaagaaacaagggttgttgctgtgtggtaaagtggtgtggagtcagtgggaatgggggggtctgccgtccggtaaggctgatgagggtgacggggaggcatcgtgctttctgatcctcaaactttatgatcatctggtgcgtaaaagtaaacataatatgccgactggttcgaacatgggcgagtccaaaccgtggaaagcaattaaagtagatctgctgcgttgcccccgcggcagttttgcgtttgcgatgttgcagtggaccggaagccgcatgttccgtcgcgatctgcgcgattacgcccgcgaagagaagaacatgatgctggacaatcatagcctgtatgacatgactcgtggtatccaactccctgctaaatcggaagaggaaattttcgaacatctggggcttgaatacctgaccccgttcgaacgtaacgca

SEQ ID NO: 5228 - protein, 529 aa, synthetic construct
  REGION 1..529: note = Variant of terminal deoxynucleotidyltransferase
MHHHHHHGGSGSHGIRTIDSDFGKKQQKKGDNHDSSATYEIKFHEFVLFILEEKMGATRRTFLTDLARKKGFRVENELTDEVTHIVAENLSRSEVLAWLKEHKMEKTKQFELLDISWLIESMKVGKPVDTKGKYQLAESVEVSANPDPTEGRVNELPPTMKTVSPYACQRRTTLNNRNQRFTDSLEILRENYVFKGNDDTALEFRRAISVLKSLPFEVRSLKDTEGLPWISDEVKGIMEEIIEVGESREVQAVLNDEWYQSFHAFTRVFGVGVKTADKWYRMGLRTLEDVRSSKTLKLTTWAKVGLTYYEDLARGVTRAEADAIWLLVQDAVATFDPDAIVEIVGGQRRGKPQSHDVDLLISSPGAEKEQEDQLLQKVMNLWKKQGLLLCGKVVWSQWEWGGLPSGKADEGDGEASCFLILKLYDHLVRKSKHNMPTGSNMGESKPWKAIKVDLLRCPRGSFAFAMLQWTGSRMFRRDLRDYAREEKNMMLDNHSLYDMTRGIQLPAKSEEEIFEHLGLEYLTPFERNA

SEQ ID NO: 5229 - DNA, 1587 bp, synthetic construct
  misc_feature 1..1587: note = Variant of terminal deoxynucleotidyltransferase
  source 1..1587: mol_type = other DNA
atgcaccatcatcatcatcatggcggtagcggcagccacggcattcgtaccatcgattcggacttcgggaagaaacagcagaaaaaaggcgataaccacgatagttccgccacttatgaaatcaaatttcacgagtttgtgctgttcattctcgaagaaaaaatgggtgcgacgcgtcgtacttttctgacagatttagcccgcaagaaagggttccgcgtcgagaatgaactgaccgacgaagttacccacatcgtggcagaaaatctgtcacgctctgaagtattggcttggctgaaagaacacaagatggagaagaccaagcaattcgaactgctggatattagctggcttatcgaaagcatgaaagttggtaaaccggtggacaccaaggggaaataccagttggcggaatcggttgaggtgagtgcgaacccagatccgacagaaggtcgtgtaaacgagctgcctcctactatgaaaaccgtttctccgtatgcgtgtcaacgccgcaccaccctgaacaaccgtaatcaacgttttacggactcgctggagattcttcgcgagaattacgtgtttaaaggcaacgacgatactgcgctggaatttcgtcgtgctatctccgtgctgaaaagccttccgtttgaggtacgtagcctgaaagacacggaaggattgccctggatcagtgatgaagtcaaagggattatggaagaaatcatcgaagtcggggagtcgcgtgaagtgcaggccgtgctcaatgatgagtggtatcaaagcttccacgcatttacgcgtgtctttggagtgggggtgaagacagcagacaagtggtaccgcatgggtctgcgcaccctggaggatgttcgttccagcaagaccctgaagttgaccacgtgggcgaaagtaggtctgacgtattatgaagatcttgctcgcggcgttacccgtgcggaagctgacgcgatttggctgctggttcaggatgcagtcgcaactttcgacccggatgcgatcgtggagattgtcggtggacagcgtcgtgggaaacctcagtctcacgacgttgatctgcttatcagttctccgggagctgaaaaagagcaagaagaccaactcctgcagaaagtgatgaatctgtggaagaaacaagggttgttgctgtgtggtaaagtggtgtggagtcagtgggaatgggggggtctgccgtccggtaaggctgatgagggtgacggggaggcatcgtgctttctgatcctcaaactttatgatcatctggtgcgtaaaagtaaacataatatgccgactggttcgaacatgggcgagtccaaaccgtggaaagcaattaaagtagatctgctgcgttgcccccgcggcagttttgcgtttgcgatgttgcagtggaccggaagccgcatgttccgtcgcgatctgcgcgattacgcccgcgaagagaagaacatgatgctggacaatcatagcctgtatgacatgactcgtggtatccaactccctgctaaatcggaagaggaaattttcgaacatctggggcttgaatacctggaaccgttctatcgtaacgca

SEQ ID NO: 5230 - protein, 529 aa, synthetic construct
  REGION 1..529: note = Variant of terminal deoxynucleotidyltransferase
MHHHHHHGGSGSHGIRTIDSDFGKKQQKKGDNHDSSATYEIKFHEFVLFILEEKMGATRRTFLTDLARKKGFRVENELTDEVTHIVAENLSRSEVLAWLKEHKMEKTKQFELLDISWLIESMKVGKPVDTKGKYQLAESVEVSANPDPTEGRVNELPPTMKTVSPYACQRRTTLNNRNQRFTDSLEILRENYVFKGNDDTALEFRRAISVLKSLPFEVRSLKDTEGLPWISDEVKGIMEEIIEVGESREVQAVLNDEWYQSFHAFTRVFGVGVKTADKWYRMGLRTLEDVRSSKTLKLTTWAKVGLTYYEDLARGVTRAEADAIWLLVQDAVATFDPDAIVEIVGGQRRGKPQSHDVDLLISSPGAEKEQEDQLLQKVMNLWKKQGLLLCGKVVWSQWEWGGLPSGKADEGDGEASCFLILKLYDHLVRKSKHNMPTGSNMGESKPWKAIKVDLLRCPRGSFAFAMLQWTGSRMFRRDLRDYAREEKNMMLDNHSLYDMTRGIQLPAKSEEEIFEHLGLEYLEPFYRNA

SEQ ID NO: 5231 - DNA, 1587 bp, synthetic construct
  misc_feature 1..1587: note = Variant of terminal deoxynucleotidyltransferase
  source 1..1587: mol_type = other DNA
atgcaccatcatcatcatcatggcggtagcggcagccacggcattcgtaccatcgattcggacttcgggaagaaacagcagaaaaaaggcgataaccacgatagttccgccacttatgaaatcaaatttcacgagtttgtgctgttcattctcgaagaaaaaatgggtgcgacgcgtcgtacttttctgacagatttagcccgcaagaaagggttccgcgtcgagaatgaactgaccgacgaagttacccacatcgtggcagaaaatctgtcacgctctgaagtattggcttggctgaaagaacacaagatggagaagaccaagcaattcgaactgctggatattagctggcttatcgaaagcatgaaagttggtaaaccggtggacaccaaggggaaataccagttggcggaatcggttgaggtgagtgcgaacccagatccgacagaaggtcgtgtaaacgagctgcctcctactatgaaaaccgtttctccgtatgcgtgtcaacgccgcaccaccctgaacaaccgtaatcaacgttttacggactcgctggagattcttcgcgagaattacgtgttcaaaggcaaccaggatactgcgctggaatttcgtcgtgctgtgtccgtgctgaaaagccttccgtttgaggtacgtagcctgaaagacacggaaggattgccctggatcagtgatgaagtcaaagggattatggaagaaatcatcgaagtcggggagtcgcgtgaagtgcaggccgtgctcaatgatgagtggtatcaaagcttccacgcatttacgcgtgtctttggagtgggggtgaagacagcagacaagtggtaccgcatgggtctgcgcaccctggaggatgttcgttccagcaagaccctgaagttgaccacgtgggcgaaagtaggtctgacgtatcgtgaagatcttgcgcgcggcgttacccgtgcggaagctgacgcgatttggctgctggttcaggatgcagtcgcaactttcgacccggatgcgatcgtggagattgtcggtggacagcgtcgtgggaaacctcagtctcacgacgttgatctgcttatcagttctccgggagctgaaaaagagcaagaagaccaactcctgcagaaagtgatgaatctgtggaagaaacaagggttgttgctgtgtggtaaagtggtgtggagtcagtgggaatgggggggtctgccgtccggtaaggctgatgagctggacggggaggcatcgtgctttctgatcctcaaactttatgatcatctggtgcgtaaaagtaaacataatatgccgactggttcgaacatgggcgagtccaaaccgtggaaagcaattaaagtagatctgctgcgttgcccccgcggcagttttgcgtttgcgatgttgcagtggaccggaagccgcatgttccgtcgcgatctgcgcgattacgcccgcgaagagaagaacatgatgctggacaatcatagcctgtatgacatgactcgtggtatccaactccctgctaaatcggaagaggaaattttcgaacatctggggcttgaatacctggaaccgttcgaacgtaacgca

SEQ ID NO: 5232 - protein, 529 aa, synthetic construct
  REGION 1..529: note = Variant of terminal deoxynucleotidyltransferase
MHHHHHHGGSGSHGIRTIDSDFGKKQQKKGDNHDSSATYEIKFHEFVLFILEEKMGATRRTFLTDLARKKGFRVENELTDEVTHIVAENLSRSEVLAWLKEHKMEKTKQFELLDISWLIESMKVGKPVDTKGKYQLAESVEVSANPDPTEGRVNELPPTMKTVSPYACQRRTTLNNRNQRFTDSLEILRENYVFKGNQDTALEFRRAVSVLKSLPFEVRSLKDTEGLPWISDEVKGIMEEIIEVGESREVQAVLNDEWYQSFHAFTRVFGVGVKTADKWYRMGLRTLEDVRSSKTLKLTTWAKVGLTYREDLARGVTRAEADAIWLLVQDAVATFDPDAIVEIVGGQRRGKPQSHDVDLLISSPGAEKEQEDQLLQKVMNLWKKQGLLLCGKVVWSQWEWGGLPSGKADELDGEASCFLILKLYDHLVRKSKHNMPTGSNMGESKPWKAIKVDLLRCPRGSFAFAMLQWTGSRMFRRDLRDYAREEKNMMLDNHSLYDMTRGIQLPAKSEEEIFEHLGLEYLEPFERNA

SEQ ID NO: 5233 - DNA, 1587 bp, synthetic construct
  misc_feature 1..1587: note = Variant of terminal deoxynucleotidyltransferase
  source 1..1587: mol_type = other DNA
atgcaccatcatcatcatcatggcggtagcggcagccacggcattcgtaccatcgattcggacttcgggaagaaacagcagaaaaaaggcgataaccacgatagttccgccacttatgaaatcaaatttcacgagtttgtgctgttcattctcgaagaaaaaatgggtgcgacgcgtcgtacttttctgacagatttagcccgcaagaaagggttccgcgtcgagaatgaactgaccgacgaagttacccacatcgtggcagaaaatctgtcacgctctgaagtattggcttggctgaaagaacacaagatggagaagaccaagcaattcgaactgctggatattagctggcttatcgaaagcatgaaagttggtaaaccggtggacaccaaggggaaataccagttggcggaatcggttgaggtgagtgcgaacccagatccgacagaaggtcgtgtaaacgagctgcctcctactatgaaaaccgtttctccgtatgcgtgtcaacgccgcaccaccctgaacaaccgtaatcaacgttttacggactcgctggagattcttcgcgagaattacgtgttcaaaggcaaccaggatactgcgctggaatttcgtcgtgctatctccgtgctgaaaagccttccgtttgaggtacgtagcctgaaagacacggaaggattgccctggatcagtgatgaagtcaaagggattatggaagaaatcatcgaagtcggggagtcgcgtgaagtgcaggccgtgctcaatgatgagtggtatcaaagcttccacgcatttacgcgtgtctttggagtgggggtgaagacagcagacaagtggtaccgcatgggtctgcgcaccctggaggatgttcgttccagcaagaccctgaagttgaccacgtgggcgaaagtaggtctgacgtattatgaagatcttgcgcgcggcgttacccgtgcggaagctgacgcgatttggctgctggttcaggatgcagtcgcaactttcgacccggatgcgatcgtggagattgtcggtggacagcgtcgtgggaaacctcagtctcacgacgttgatctgcttatcagttctccgggagctgaaaaagagcaagaagaccaactcctgcagaaagtgatgaatctgtggaagaaacaagggttgttgctgtgtggtaaagtggtgtggagtcagtgggaatgggggggtctgccgtccggtaaggctgatgagggtgacggggaggcatcgtgctttctgatcctcaaactttatgatcatctggtgcgtaaaagtaaacataatatgccgactggttcgaacatgggcgagtccaaaccgtggaaagcaattaaagtagatctgctgcgttgcccccgcggcagttttgcgtttgcgatgttgcagtggaccggaagccgcatgttccgtcgcgatctgcgcgattacgcccgcgaagagaagaacatgatgctggacaatcatagcctgtatgacatgactcgtggtatccaactccctgctaaatcggaagaggaaattttcgaacatctggggcttgaatacctggaaccgttcgaacgtaacgca

SEQ ID NO: 5234 - protein, 529 aa, synthetic construct
  REGION 1..529: note = Variant of terminal deoxynucleotidyltransferase
MHHHHHHGGSGSHGIRTIDSDFGKKQQKKGDNHDSSATYEIKFHEFVLFILEEKMGATRRTFLTDLARKKGFRVENELTDEVTHIVAENLSRSEVLAWLKEHKMEKTKQFELLDISWLIESMKVGKPVDTKGKYQLAESVEVSANPDPTEGRVNELPPTMKTVSPYACQRRTTLNNRNQRFTDSLEILRENYVFKGNQDTALEFRRAISVLKSLPFEVRSLKDTEGLPWISDEVKGIMEEIIEVGESREVQAVLNDEWYQSFHAFTRVFGVGVKTADKWYRMGLRTLEDVRSSKTLKLTTWAKVGLTYYEDLARGVTRAEADAIWLLVQDAVATFDPDAIVEIVGGQRRGKPQSHDVDLLISSPGAEKEQEDQLLQKVMNLWKKQGLLLCGKVVWSQWEWGGLPSGKADEGDGEASCFLILKLYDHLVRKSKHNMPTGSNMGESKPWKAIKVDLLRCPRGSFAFAMLQWTGSRMFRRDLRDYAREEKNMMLDNHSLYDMTRGIQLPAKSEEEIFEHLGLEYLEPFERNA

SEQ ID NO: 5235 - DNA, 1587 bp, synthetic construct
  misc_feature 1..1587: note = Variant of terminal deoxynucleotidyltransferase
  source 1..1587: mol_type = other DNA
atgcaccatcatcatcatcatggcggtagcggcagccacggcattcgtaccatcgattcggacttcgggaagaaacagcagaaaaaaggcgataaccacgatagttccgccacttatgaaatcaaatttcacgagtttgtgctgttcattctcgaagaaaaaatgggtgcgacgcgtcgtacttttctgacagatttagcccgcaagaaagggttccgcgtcgagaatgaactgaccgacgaagttacccacatcgtggcagaaaatctgtcacgctctgaagtattggcttggctgaaagaacacaagatggagaagaccaagcaattcgaactgctggatattagctggcttatcgaaagcatgaaagttggtaaaccggtggacaccaaggggaaataccagttggcggaatcggttgaggtgagtgcgaacccagatccgacagaaggtcgtgtaaacgagctgcctcctactatgaaaaccgtttctccgtatgcgtgtcaacgccgcaccaccctgaacaaccgtaatcaacgttttacggactcgctggagattcttcgcgagaattacgtgctgaaaggcaaccaggatactgcgctggaatttcgtcgtgctgtgtccgtgctgaaaagccttccgtttgaggtacgtagcctgaaagacacggaaggattgccctggatcagtgatgaagtcaaagggattatggaagaaatcatcgaagtcggggagtcgcgtgaagtgcaggccgtgctcaatgatgagtggtatcaaagcttccacgcatttacgcgtgtctttggagtgggggtgaagacagcagacaagtggtaccgcatgggtctgcgcaccctggaggatgttcgttccagcaagaccctgaagttgaccacgtgggcgaaagtaggtctgacgtattacgaagatcttagtcgcggcgttacccgtgcggaagctgacgcgatttggctgctggttcaggatgcagtcgcaactttcgacccggatgcgatcgtggagattgtcggtggacagcgtcgtgggaaacctcagtctcacgacgttgatctgcttatcagttctccgggagctgaaaaagagcaagaagaccaactcctgcagaaagtgatgaatctgtggaagaaacaagggttgttgctgtgtggtaaagtggtgtggagtcagtgggaatgggggggtctgccgtccggtaaggctgatgagggggacggggaggcatcgtgctttctgatcctcaaactttatgatcatctggtgcgtaaaagtaaacataatatgccgactggttcgaacatgggcgagtccaaaccgtggaaagcaattaaagtagatctgctgcgttgcccccgcggcagttttgcgtttgcgatgttgcagtggaccggaagccgcatgttccgtcgcgatctgcgcgattacgcccgcgaagagaagaacatgatgctggacaatcatagcctgtatgacatgactcgtggtatccaactccctgctaaatcggaagaggaaattttcgaacatctggggcttgaatacctggaaccgttcgaacgtaacgca

SEQ ID NO: 5236 - protein, 529 aa, synthetic construct
  REGION 1..529: note = Variant of terminal deoxynucleotidyltransferase
MHHHHHHGGSGSHGIRTIDSDFGKKQQKKGDNHDSSATYEIKFHEFVLFILEEKMGATRRTFLTDLARKKGFRVENELTDEVTHIVAENLSRSEVLAWLKEHKMEKTKQFELLDISWLIESMKVGKPVDTKGKYQLAESVEVSANPDPTEGRVNELPPTMKTVSPYACQRRTTLNNRNQRFTDSLEILRENYVLKGNQDTALEFRRAVSVLKSLPFEVRSLKDTEGLPWISDEVKGIMEEIIEVGESREVQAVLNDEWYQSFHAFTRVFGVGVKTADKWYRMGLRTLEDVRSSKTLKLTTWAKVGLTYYEDLSRGVTRAEADAIWLLVQDAVATFDPDAIVEIVGGQRRGKPQSHDVDLLISSPGAEKEQEDQLLQKVMNLWKKQGLLLCGKVVWSQWEWGGLPSGKADEGDGEASCFLILKLYDHLVRKSKHNMPTGSNMGESKPWKAIKVDLLRCPRGSFAFAMLQWTGSRMFRRDLRDYAREEKNMMLDNHSLYDMTRGIQLPAKSEEEIFEHLGLEYLEPFERNA

SEQ ID NO: 5237 - DNA, 1587 bp, synthetic construct
  misc_feature 1..1587: note = Variant of terminal deoxynucleotidyltransferase
  source 1..1587: mol_type = other DNA
atgcaccatcatcatcatcatggcggtagcggcagccacggcattcgtaccatcgattcggacttcgggaagaaacagcagaaaaaaggcgataaccacgatagttccgccacttatgaaatcaaatttcacgagtttgtgctgttcattctcgaagaaaaaatgggtgcgacgcgtcgtacttttctgacagatttagcccgcaagaaagggttccgcgtcgagaatgaactgaccgacgaagttacccacatcgtggcagaaaatctgtcacgctctgaagtattggcttggctgaaagaacacaagatggagaagaccaagcaattcgaactgctggatattagctggcttatcgaaagcatgaaagttggtaaaccggtggacaccaaggggaaataccagttggcggaatcggttgaggtgagtgcgaacccagatccgacagaaggtcgtgtaaacgagctgcctcctactatgaaaaccgtttctccgtatgcgtgtcaacgccgcaccaccctgaacaaccgtaatcaacgttttacggactcgctggagattcttcgcgagaattacgtgtttaaaggcaacgacgatactgcgctggaatttcgtcgtgctatctccgtgctgaaaagccttccgtttgaggtacgtagcctgaaagacacggaaggattgccctggatcagtgatgaagtcaaagggattatggaagaaatcatcgaagtcggggagtcgcgtgaagtgcaggccgtgctcaatgatgagtggtatcaaagcttccacgcatttacgcgtgtctttggagtggggcaaggcacagcagacaagtggtaccgcatgggtctgcgcaccctggaggatgttcgttccagcaagaccctgaagttgaccacgtgggcgaaagtaggtctgacgtattatgaagatcttgctcgcggcgttacccgtgcggaagctgacgcgatttggctgctggttcaggatgcagtcgcaactttcgacccggatgcgatcgtggagattgtcggtggacagcgtcgtgggaaacctcagtctcacgacgttgatctgcttatcagttctccgggagctgaaaaagagcaagaagaccaactcctgcagaaagtgatgaatctgtggaagaaacaagggttgttgctgtgtggtaaagtggtgtggagtcagtgggaatgggggggtctgccgtccggtaaggctgatgagggtgacggggaggcatcgtgctttctgatcctcaaactttatgatcatctggtgcgtaaaagtaaacataatatgccgactggttcgaacatgggcgagtccaaaccgtggaaagcaattaaagtagatctgctgcgttgcccccgcggcagttttgcgtttgcgatgttgcagtggaccggaagccgcatgttccgtcgcgatctgcgcgattacgcccgcgaagagaagaacatgatgctggacaatcatagcctgtatgacatgactcgtggtatccaactccctgctaaatcggaagaggaaattttcgaacatctggggcttgaatacctggaaccgttcgaacgtaacgca

SEQ ID NO: 5238 - protein, 529 aa, synthetic construct
  REGION 1..529: note = Variant of terminal deoxynucleotidyltransferase
MHHHHHHGGSGSHGIRTIDSDFGKKQQKKGDNHDSSATYEIKFHEFVLFILEEKMGATRRTFLTDLARKKGFRVENELTDEVTHIVAENLSRSEVLAWLKEHKMEKTKQFELLDISWLIESMKVGKPVDTKGKYQLAESVEVSANPDPTEGRVNELPPTMKTVSPYACQRRTTLNNRNQRFTDSLEILRENYVFKGNDDTALEFRRAISVLKSLPFEVRSLKDTEGLPWISDEVKGIMEEIIEVGESREVQAVLNDEWYQSFHAFTRVFGVGQGTADKWYRMGLRTLEDVRSSKTLKLTTWAKVGLTYYEDLARGVTRAEADAIWLLVQDAVATFDPDAIVEIVGGQRRGKPQSHDVDLLISSPGAEKEQEDQLLQKVMNLWKKQGLLLCGKVVWSQWEWGGLPSGKADEGDGEASCFLILKLYDHLVRKSKHNMPTGSNMGESKPWKAIKVDLLRCPRGSFAFAMLQWTGSRMFRRDLRDYAREEKNMMLDNHSLYDMTRGIQLPAKSEEEIFEHLGLEYLEPFERNA

SEQ ID NO: 5239 - DNA, 1587 bp, synthetic construct
  misc_feature 1..1587: note = Variant of terminal deoxynucleotidyltransferase
  source 1..1587: mol_type = other DNA
atgcaccatcatcatcatcatggcggtagcggcagccacggcattcgtaccatcgattcggacttcgggaagaaacagcagaaaaaaggcgataaccacgatagttccgccacttatgaaatcaaatttcacgagtttgtgctgttcattctcgaagaaaaaatgggtgcgacgcgtcgtacttttctgacagatttagcccgcaagaaagggttccgcgtcgagaatgaactgaccgacgaagttacccacatcgtggcagaaaatctgtcacgctctgaagtattggcttggctgaaagaacacaagatggagaagaccaagcaattcgaactgctggatattagctggcttatcgaaagcatgaaagttggtaaaccggtggacaccaaggggaaataccagttggcggaatcggttgaggtgagtgcgaacccagatccgacagaaggtcgtgtaaacgagctgcctcctactatgaaaaccgtttctccgtatgcgtgtcaacgccgcaccaccctgaacaaccgtaatcaacgttttacggactcgctggagattcttcgcgagaattacgtgtggaaaggcaaccaggatactgcgctggaatttcgtcgtgctatctccgtgctgaaaagccttccgtttgaggtacgtagcctgaaagacacggaaggattgccctggatcagtgatgaagtcaaagggattatggaagaaatcatcgaagtcggggagtcgcgtgaagtgcaggccgtgctcaatgatgagtggtatcaaagcttccacgcatttacgcgtgtctttggagtgggggtgaagacagcagacaagtggtaccgcatgggtctgcgcaccctggaggatgttcgttccagcaagaccctgaagttgaccacgtgggcgaaagtaggtctgacgtattatgaagatcttgctcgcggcgttacccgtgcggaagctgacgcgatttggctgctggttcaggatgcagtcgcaactttcgacccggatgcgatcgtggagattgtcggtggacagcgtcgtgggaaacctcagtctcacgacgttgatctgcttatcagttctccgggagctgaaaaagagcaagaagaccaactcctgcagaaagtgatgaatctgtggaagaaacaagggttgttgctgtgtggtaaagtggtgtggagtcagtgggaatgggggggtctgccgtccggtaaggctgatgagggtgacggggaggcatcgtgctttctgatcctcaaactttatgatcatctggtgcgtaaaagtaaacataatatgccgactggttcgaacatgggcgagtccaaaccgtggaaagcaattaaagtagatctgctgcgttgcccccgcggcagttttgcgtttgcgatgttgcagtggaccggaagccgcatgttccgtcgcgatctgcgcgattacgcccgcgaagagaagaacatgatgctggacaatcatagcctgtatgacatgactcgtggtatccaactccctgctaaatcggaagaggaaattttcgaacatctggggcttgaatacctggaaccgttcgaacgtaacgca

SEQ ID NO: 5240 - protein, 529 aa, synthetic construct
  REGION 1..529: note = Variant of terminal deoxynucleotidyltransferase
MHHHHHHGGSGSHGIRTIDSDFGKKQQKKGDNHDSSATYEIKFHEFVLFILEEKMGATRRTFLTDLARKKGFRVENELTDEVTHIVAENLSRSEVLAWLKEHKMEKTKQFELLDISWLIESMKVGKPVDTKGKYQLAESVEVSANPDPTEGRVNELPPTMKTVSPYACQRRTTLNNRNQRFTDSLEILRENYVWKGNQDTALEFRRAISVLKSLPFEVRSLKDTEGLPWISDEVKGIMEEIIEVGESREVQAVLNDEWYQSFHAFTRVFGVGVKTADKWYRMGLRTLEDVRSSKTLKLTTWAKVGLTYYEDLARGVTRAEADAIWLLVQDAVATFDPDAIVEIVGGQRRGKPQSHDVDLLISSPGAEKEQEDQLLQKVMNLWKKQGLLLCGKVVWSQWEWGGLPSGKADEGDGEASCFLILKLYDHLVRKSKHNMPTGSNMGESKPWKAIKVDLLRCPRGSFAFAMLQWTGSRMFRRDLRDYAREEKNMMLDNHSLYDMTRGIQLPAKSEEEIFEHLGLEYLEPFERNA

SEQ ID NO: 5241 - DNA, 1587 bp, synthetic construct
  misc_feature 1..1587: note = Variant of terminal deoxynucleotidyltransferase
  source 1..1587: mol_type = other DNA
atgcaccatcatcatcatcatggcggtagcggcagccacggcattcgtaccatcgattcggacttcgggaagaaacagcagaaaaaaggcgataaccacgatagttccgccacttatgaaatcaaatttcacgagtttgtgctgttcattctcgaagaaaaaatgggtgcgacgcgtcgtacttttctgacagatttagcccgcaagaaagggttccgcgtcgagaatgaactgaccgacgaagttacccacatcgtggcagaaaatctgtcacgctctgaagtattggcttggctgaaagaacacaagatggagaagaccaagcaattcgaactgctggatattagctggcttatcgaaagcatgaaagttggtaaaccggtggacaccaaggggaaataccagttggcggaatcggttgaggtgagtgcgaacccagatccgacagaaggtcgtgtaaacgagctgcctcctactatgaaaaccgtttctccgtatgcgtgtcaacgccgcaccaccctgaacaaccgtaatcaacgttttacggactcgctggagattcttcgcgagaattacgtgtggaaaggcaacgtggatactgcgctggaatttcgtcgtgctatctccgtgctgaaaagccttccgtttgaggtacgtagcctgaaagacacggaaggattgccctggatcagtgatgaagtcaaagggattatggaagaaatcatcgaagtcggggagtcgcgtgaagtgcaggccgtgctcaatgatgagtggtatcaaagcttccacgcatttacgcgtgtctttggagtgggggtgaagacagcagacaagtggtaccgcatgggtctgcgcaccctggaggatgttcgttccagcaagaccctgaagttgaccacgtgggcgaaagtaggtctgacgtattacgaagatcttgctcgcggcgttacccgtgcggaagctgacgcgatttggctgctggttcaggatgcagtcgcaactttcgacccggatgcgatcgtggagattgtcggtggacagcgtcgtgggaaacctcagtctcacgacgttgatctgcttatcagttctccgggagctgaaaaagagcaagaagaccaactcctgcagaaagtgatgaatctgtggaagaaacaagggttgttgctgtgtggtaaagtggtgtggagtcagtgggaatgggggggtctgccgtccggtaaggctgatgagggggacggggaggcatcgtgctttctgatcctcaaactttatgatcatctggtgcgtaaaagtaaacataatatgccgactggttcgaacatgggcgagtccaaaccgtggaaagcaattaaagtagatctgctgcgttgcccccgcggcagttttgcgtttgcgatgttgcagtggaccggaagccgcatgttccgtcgcgatctgcgcgattacgcccgcgaagagaagaacatgatgctggacaatcatagcctgtatgacatgactcgtggtatccaactccctgctaaatcggaagaggaaattttcgaacatctggggcttgaatacctggaaccgttcgaacgtaacgca

SEQ ID NO: 5242 - protein, 529 aa, synthetic construct
  REGION 1..529: note = Variant of terminal deoxynucleotidyltransferase
MHHHHHHGGSGSHGIRTIDSDFGKKQQKKGDNHDSSATYEIKFHEFVLFILEEKMGATRRTFLTDLARKKGFRVENELTDEVTHIVAENLSRSEVLAWLKEHKMEKTKQFELLDISWLIESMKVGKPVDTKGKYQLAESVEVSANPDPTEGRVNELPPTMKTVSPYACQRRTTLNNRNQRFTDSLEILRENYVWKGNVDTALEFRRAISVLKSLPFEVRSLKDTEGLPWISDEVKGIMEEIIEVGESREVQAVLNDEWYQSFHAFTRVFGVGVKTADKWYRMGLRTLEDVRSSKTLKLTTWAKVGLTYYEDLARGVTRAEADAIWLLVQDAVATFDPDAIVEIVGGQRRGKPQSHDVDLLISSPGAEKEQEDQLLQKVMNLWKKQGLLLCGKVVWSQWEWGGLPSGKADEGDGEASCFLILKLYDHLVRKSKHNMPTGSNMGESKPWKAIKVDLLRCPRGSFAFAMLQWTGSRMFRRDLRDYAREEKNMMLDNHSLYDMTRGIQLPAKSEEEIFEHLGLEYLEPFERNA

SEQ ID NO: 5243 - DNA, 1587 bp, synthetic construct
  misc_feature 1..1587: note = Variant of terminal deoxynucleotidyltransferase
  source 1..1587: mol_type = other DNA
atgcaccatcatcatcatcatggcggtagcggcagccacggcattcgtaccatcgattcggacttcgggaagaaacagcagaaaaaaggcgataaccacgatagttccgccacttatgaaatcaaatttcacgagtttgtgctgttcattctcgaagaaaaaatgggtgcgacgcgtcgtacttttctgacagatttagcccgcaagaaagggttccgcgtcgagaatgaactgaccgacgaagttacccacatcgtggcagaaaatctgtcacgctctgaagtattggcttggctgaaagaacacaagatggagaagaccaagcaattcgaactgctggatattagctggcttatcgaaagcatgaaagttggtaaaccggtggacaccaaggggaaataccagttggcggaatcggttgaggtgagtgcgaacccagatccgacagaaggtcgtgtaaacgagctgcctcctactatgaaaaccgtttctccgtatgcgtgtcaacgccgcaccaccctgaacaaccgtaatcaacgttttacggactcgctggagattcttcgcgagaattacgtgttcaaaggcaacggggatactgcgctggaatttcgtcgtgctatctccgtgctgaaaagccttccgtttgaggtacgtagcctgaaagacacggaaggattgccctggatcagtgatgaagtcaaagggattatggaagaaatcatcgaagtcggggagtcgcgtgaagtgcaggccgtgctcaatgatgagtggtatcaaagcttccacgcatttacgcgtgtctttggagtgggggtgaagacagcagacaagtggtaccgcatgggtctgcgcaccctggaggatgttcgttccagcaagaccctgaagttgaccacgtgggcgaaagtaggtctgacgtattacgaagatcttgcgcgcggcgttacccgtgcggaagctgacgcgatttggctgctggttcaggatgcagtcgcaactttcgacccggatgcgatcgtggagattgtcggtggacagcgtcgtgggaaacctcagtctcacgacgttgatctgcttatcagttctccgggagctgaaaaagagcaagaagaccaactcctgcagaaagtgatgaatctgtggaagaaacaagggttgttgctgtgtggtaaagtggtgtggagtcagtgggaatgggggggtctgccgtccggtaaggctgatgagggggacggggaggcatcgtgctttctgatcctcaaactttatgatcatctggtgcgtaaaagtaaacataatatgccgactggttcgaacatgggcgagtccaaaccgtggaaagcaattaaagtagatctgctgcgttgcccccgcggcagttttgcgtttgcgatgttgcagtggaccggaagccgcatgttccgtcgcgatctgcgcgattacgcccgcgaagagaagaacatgatgctggacaatcatagcctgtatgacatgactcgtggtatccaactccctgctaaatcggaagaggaaattttcgaacatctggggcttgaatacctggaaccgttcgaacgtaacgca

SEQ ID NO: 5244 - protein, 529 aa, synthetic construct
  REGION 1..529: note = Variant of terminal deoxynucleotidyltransferase
MHHHHHHGGSGSHGIRTIDSDFGKKQQKKGDNHDSSATYEIKFHEFVLFILEEKMGATRRTFLTDLARKKGFRVENELTDEVTHIVAENLSRSEVLAWLKEHKMEKTKQFELLDISWLIESMKVGKPVDTKGKYQLAESVEVSANPDPTEGRVNELPPTMKTVSPYACQRRTTLNNRNQRFTDSLEILRENYVFKGNGDTALEFRRAISVLKSLPFEVRSLKDTEGLPWISDEVKGIMEEIIEVGESREVQAVLNDEWYQSFHAFTRVFGVGVKTADKWYRMGLRTLEDVRSSKTLKLTTWAKVGLTYYEDLARGVTRAEADAIWLLVQDAVATFDPDAIVEIVGGQRRGKPQSHDVDLLISSPGAEKEQEDQLLQKVMNLWKKQGLLLCGKVVWSQWEWGGLPSGKADEGDGEASCFLILKLYDHLVRKSKHNMPTGSNMGESKPWKAIKVDLLRCPRGSFAFAMLQWTGSRMFRRDLRDYAREEKNMMLDNHSLYDMTRGIQLPAKSEEEIFEHLGLEYLEPFERNA

SEQ ID NO: 5245 - DNA, 1587 bp, synthetic construct
  misc_feature 1..1587: note = Variant of terminal deoxynucleotidyltransferase
  source 1..1587: mol_type = other DNA
atgcaccatcatcatcatcatggcggtagcggcagccacggcattcgtaccatcgattcggacttcgggaagaaacagcagaaaaaaggcgataaccacgatagttccgccacttatgaaatcaaatttcacgagtttgtgctgttcattctcgaagaaaaaatgggtgcgacgcgtcgtacttttctgacagatttagcccgcaagaaagggttccgcgtcgagaatgaactgaccgacgaagttacccacatcgtggcagaaaatctgtcacgctctgaagtattggcttggctgaaagaacacaagatggagaagaccaagcaattcgaactgctggatattagctggcttatcgaaagcatgaaagttggtaaaccggtggacaccaaggggaaataccagttggcggaatcggttgaggtgagtgcgaacccagatccgacagaaggtcgtgtaaacgagctgcctcctactatgaaaaccgtttctccgtatgcgtgtcaacgccgcaccaccctgaacaaccgtaatcaacgttttacggactcgctggagattcttcgcgagaattacgtgtttaaaggcaacgacgatactgcgctggaatttcgtcgtgctatctccgtgctgaaaagccttccgtttgaggtacgtagcctgaaagacacggaaggattgccctggatcagtgatgaagtcaaagggattatggaagaaatcatcgaagtcggggagtcgcgtgaagtgcaggccgtgctcaatgatgagtggtatcaaagcttccacgcatttacgcgtgtctttggagtgggggtaggcacagcagacaagtggtaccagatgggtctgcgcaccctggaggatgttcgttccagcaagaccctgaagttgaccacgtgggcgaaagtaggtctgacgtattatgaagatcttgctcgcggcgttacccgtgcggaagctgacgcgatttggctgctggttcaggatgcagtcgcaactttcgacccggatgcgatcgtggagattgtcggtggacagcgtcgtgggaaacctcagtctcacgacgttgatctgcttatcagttctccgggagctgaaaaagagcaagaagaccaactcctgcagaaagtgatgaatctgtggaagaaacaagggttgttgctgtgtggtaaagtgtattggagtcagtgggaatgggggggtctgccgtccggtaaggctgatgagggtgacggggaggcatcgtgctttctgatcctcaaactttatgatcatctggtgcgtaaaagtaaacataatatgccgactggttcgaacatgggcgagtccaaaccgtggaaagcaattaaagtagatctgctgcgttgcccccgcggcagttttgcgtttgcgatgttgcagtggaccggaagccgcatgttccgtcgcgatctgcgcgattacgcccgcgaagagaagaacatgatgctggacaatcatagcctgtatgacatgactcgtggtatccaactccctgctaaatcggaagaggaaattttcgaacatctggggcttgaatacctggaaccgttctatcgtaacgca

SEQ ID NO: 5246 - protein, 529 aa, synthetic construct
  REGION 1..529: note = Variant of terminal deoxynucleotidyltransferase
MHHHHHHGGSGSHGIRTIDSDFGKKQQKKGDNHDSSATYEIKFHEFVLFILEEKMGATRRTFLTDLARKKGFRVENELTDEVTHIVAENLSRSEVLAWLKEHKMEKTKQFELLDISWLIESMKVGKPVDTKGKYQLAESVEVSANPDPTEGRVNELPPTMKTVSPYACQRRTTLNNRNQRFTDSLEILRENYVFKGNDDTALEFRRAISVLKSLPFEVRSLKDTEGLPWISDEVKGIMEEIIEVGESREVQAVLNDEWYQSFHAFTRVFGVGVGTADKWYQMGLRTLEDVRSSKTLKLTTWAKVGLTYYEDLARGVTRAEADAIWLLVQDAVATFDPDAIVEIVGGQRRGKPQSHDVDLLISSPGAEKEQEDQLLQKVMNLWKKQGLLLCGKVYWSQWEWGGLPSGKADEGDGEASCFLILKLYDHLVRKSKHNMPTGSNMGESKPWKAIKVDLLRCPRGSFAFAMLQWTGSRMFRRDLRDYAREEKNMMLDNHSLYDMTRGIQLPAKSEEEIFEHLGLEYLEPFYRNA

SEQ ID NO: 5247 - DNA, 1587 bp, synthetic construct
  misc_feature 1..1587: note = Variant of terminal deoxynucleotidyltransferase
  source 1..1587: mol_type = other DNA
atgcaccatcatcatcatcatggcggtagcggcagccacggcattcgtaccatcgattcggacttcgggaagaaacagcagaaaaaaggcgataaccacgatagttccgccacttatgaaatcaaatttcacgagtttgtgctgttcattctcgaagaaaaaatgggtgcgacgcgtcgtacttttctgacagatttagcccgcaagaaagggttccgcgtcgagaatgaactgaccgacgaagttacccacatcgtggcagaaaatctgtcacgctctgaagtattggcttggctgaaagaacacaagatggagaagaccaagcaattcgaactgctggatattagctggcttatcgaaagcatgaaagttggtaaaccggtggacaccaaggggaaataccagttggcggaatcggttgaggtgagtgcgaacccagatccgacagaaggtcgtgtaaacgagctgcctcctactatgaaaaccgtttctccgtatgcgtgtcaacgccgcaccaccctgaacaaccgtaatcaacgttttacggactcgctggagattcttcgcgagaattacgtgtttaaaggcaacgacgatactgcgctggaatttcgtcgtgctatctccgtgctgaaaagccttccgtttgaggtacgtagcctgaaagacacggaaggattgccctggatcagtgatgaagtcaaagggattatggaagaaatcatcgaagtcggggagtcgcgtgaagtgcaggccgtgctcaatgatgagtggtatcaaagcttccacgcatttacgcgtgtctttggagtgggggtaggcacagcagacaagtggtaccagatgggtctgcgcaccctggaggatgttcgttccagcaagaccctgaagttgaccacgtgggcgaaagtaggtctgacgtattatgaagatcttgctcgcggcgttacccgtgcggaagctgacgcgatttggctgctggttcaggatgcagtcgcaactttcgacccggatgcgatcgtggagattgtcggtggacagcgtcgtgggaaacctcagtctcacgacgttgatctgcttatcagttctccgggagctgaaaaagagcaagaagaccaactcctgcagaaagtgatgaatctgtggaagaaacaagggttgttgctgtgtggtaaagtgatttggagtcagtgggaatgggggggtctgccgtccggtaaggctgatgagggtgacggggaggcatcgtgctttctgatcctcaaactttatgatcatctggtgcgtaaaagtaaacataatatgccgactggttcgaacatgggcgagtccaaaccgtggaaagcaattaaagtagatctgctgcgttgcccccgcggcagttttgcgtttgcgatgttgcagtggaccggaagccgcatgttccgtcgcgatctgcgcgattacgcccgcgaagagaagaacatgatgctggacaatcatagcctgtatgacatgactcgtggtatccaactccctgctaaatcggaagaggaaattttcgaacatctggggcttgaatacctggaaccgttctatcgtaacgca

SEQ ID NO: 5248 - protein, 529 aa, synthetic construct
  REGION 1..529: note = Variant of terminal deoxynucleotidyltransferase
MHHHHHHGGSGSHGIRTIDSDFGKKQQKKGDNHDSSATYEIKFHEFVLFILEEKMGATRRTFLTDLARKKGFRVENELTDEVTHIVAENLSRSEVLAWLKEHKMEKTKQFELLDISWLIESMKVGKPVDTKGKYQLAESVEVSANPDPTEGRVNELPPTMKTVSPYACQRRTTLNNRNQRFTDSLEILRENYVFKGNDDTALEFRRAISVLKSLPFEVRSLKDTEGLPWISDEVKGIMEEIIEVGESREVQAVLNDEWYQSFHAFTRVFGVGVGTADKWYQMGLRTLEDVRSSKTLKLTTWAKVGLTYYEDLARGVTRAEADAIWLLVQDAVATFDPDAIVEIVGGQRRGKPQSHDVDLLISSPGAEKEQEDQLLQKVMNLWKKQGLLLCGKVIWSQWEWGGLPSGKADEGDGEASCFLILKLYDHLVRKSKHNMPTGSNMGESKPWKAIKVDLLRCPRGSFAFAMLQWTGSRMFRRDLRDYAREEKNMMLDNHSLYDMTRGIQLPAKSEEEIFEHLGLEYLEPFYRNA

SEQ ID NO: 5249 - DNA, 1587 bp, synthetic construct
  misc_feature 1..1587: note = Variant of terminal deoxynucleotidyltransferase
  source 1..1587: mol_type = other DNA
atgcaccatcatcatcatcatggcggtagcggcagccacggcattcgtaccatcgattcggacttcgggaagaaacagcagaaaaaaggcgataaccacgatagttccgccacttatgaaatcaaatttcacgagtttgtgctgttcattctcgaagaaaaaatgggtgcgacgcgtcgtacttttctgacagatttagcccgcaagaaagggttccgcgtcgagaatgaactgaccgacgaagttacccacatcgtggcagaaaatctgtcacgctctgaagtattggcttggctgaaagaacacaagatggagaagaccaagcaattcgaactgctggatattagctggcttatcgaaagcatgaaagttggtaaaccggtggacaccaaggggaaataccagttggcggaatcggttgaggtgagtgcgaacccagatccgacagaaggtcgtgtaaacgagctgcctcctactatgaaaaccgtttctccgtatgcgtgtcaacgccgcaccaccctgaacaaccgtaatcaacgttttacggactcgctggagattcttcgcgagaattacgtgtttaaaggcaacgacgattcggcgctggaatttcgtcgtgctatctccgtgctgaaaagccttccgtttgaggtacgtagcctgaaagacacggaaggattgccctggatcagtgatgaagtcaaagggattatggaagaaatcatcgaagtcggggagtcgcgtgaagtgcaggccgtgctcaatgatgagtggtatcaaagcttccacgcatttacgcgtgtctttggagtgggggtaggcacagcagacaagtggtaccagatgggtctgcgcaccctggaggatgttcgttccagcaagaccctgaagttgaccacgtgggcgaaagtaggtctgacgtattatgaagatcttgctcgcggcgttacccgtgcggaagctgacgcgatttggctgctggttcaggatgcagtcgcaactttcgacccggatgcgatcgtggagattgtcggtggacagcgtcgtgggaaacctcagtctcacgacgttgatctgcttatcagttctccgggagctgaaaaagagcaagaagaccaactcctgcagaaagtgatgaatctgtggaagaaacaagggttgttgctgtgtggtaaagtggtgtggagtcagtgggaatgggggggtctgccgtccggtaaggctgatgagggtgacggggaggcatcgtgctttctgatcctcaaactttatgatcatctggtgcgtaaaagtaaacataatatgccgactggttcgaacatgggcgagtccaaaccgtggaaagcaattaaagtagatctgctgcgttgcccccgcggcagttttgcgtttgcgatgttgcagtggaccggaagccgcatgttccgtcgcgatctgcgcgattacgcccgcgaagagaagaacatgatgctggacaatcatagcctgtatgacatgactcgtggtatccaactccctgctaaatcggaagaggaaattttcgaacatctggggcttgaatacctggaaccgttctatcgtaacgca

SEQ ID NO: 5250 - protein, 529 aa, synthetic construct
  REGION 1..529: note = Variant of terminal deoxynucleotidyltransferase
MHHHHHHGGSGSHGIRTIDSDFGKKQQKKGDNHDSSATYEIKFHEFVLFILEEKMGATRRTFLTDLARKKGFRVENELTDEVTHIVAENLSRSEVLAWLKEHKMEKTKQFELLDISWLIESMKVGKPVDTKGKYQLAESVEVSANPDPTEGRVNELPPTMKTVSPYACQRRTTLNNRNQRFTDSLEILRENYVFKGNDDSALEFRRAISVLKSLPFEVRSLKDTEGLPWISDEVKGIMEEIIEVGESREVQAVLNDEWYQSFHAFTRVFGVGVGTADKWYQMGLRTLEDVRSSKTLKLTTWAKVGLTYYEDLARGVTRAEADAIWLLVQDAVATFDPDAIVEIVGGQRRGKPQSHDVDLLISSPGAEKEQEDQLLQKVMNLWKKQGLLLCGKVVWSQWEWGGLPSGKADEGDGEASCFLILKLYDHLVRKSKHNMPTGSNMGESKPWKAIKVDLLRCPRGSFAFAMLQWTGSRMFRRDLRDYAREEKNMMLDNHSLYDMTRGIQLPAKSEEEIFEHLGLEYLEPFYRNA

SEQ ID NO: 5251 - DNA, 1587 bp, synthetic construct
  misc_feature 1..1587: note = Variant of terminal deoxynucleotidyltransferase
  source 1..1587: mol_type = other DNA
atgcaccatcatcatcatcatggcggtagcggcagccacggcattcgtaccatcgattcggacttcgggaagaaacagcagaaaaaaggcgataaccacgatagttccgccacttatgaaatcaaatttcacgagtttgtgctgttcattctcgaagaaaaaatgggtgcgacgcgtcgtacttttctgacagatttagcccgcaagaaagggttccgcgtcgagaatgaactgaccgacgaagttacccacatcgtggcagaaaatctgtcacgctctgaagtattggcttggctgaaagaacacaagatggagaagaccaagcaattcgaactgctggatattagctggcttatcgaaagcatgaaagttggtaaaccggtggacaccaaggggaaataccagttggcggaatcggttgaggtgagtgcgaacccagatccgacagaaggtcgtgtaaacgagctgcctcctactatgaaaaccgtttctccgtatgcgtgtcaacgccgcaccaccctgaacaacctgaatcaacgttttacggactcgctggagattcttcgcgagaattacgtgtttaaaggcaacgacgatactgcgctggaatttcgtcgtgctatctccgtgctgaaaagccttccgtttgaggtacgtagcctgaaagacacggaaggattgccctggatcagtgatgaagtcaaagggattatggaagaaatcatcgaagtcggggagtcgcgtgaagtgcaggccgtgctcaatgatgagtggtatcaaagcttccacgcatttacgcgtgtctttggagtgggggtaggcacagcagacaagtggtaccagatgggtctgcgcaccctggaggatgttcgttccagcaagaccctgaagttgaccacgtgggcgaaagtaggtctgacgtattatgaagatcttgctcgcggcgttacccgtgcggaagctgacgcgatttggctgctggttcaggatgcagtcgcaactttcgacccggatgcgatcgtggagattgtcggtggacagcgtcgtgggaaacctcagtctcacgacgttgatctgcttatcagttctccgggagctgaaaaagagcaagaagaccaactcctgcagaaagtgatgaatctgtggaagaaacaagggttgttgctgtgtggtaaagtggtgtggagtcagtgggaatgggggggtctgccgtccggtaaggctgatgagggtgacggggaggcatcgtgctttctgatcctcaaactttatgatcatctggtgcgtaaaagtaaacataatatgccgactggttcgaacatgggcgagtccaaaccgtggaaagcaattaaagtagatctgctgcgttgcccccgcggcagttttgcgtttgcgatgttgcagtggaccggaagccgcatgttccgtcgcgatctgcgcgattacgcccgcgaagagaagaacatgatgctggacaatcatagcctgtatgacatgactcgtggtatccaactccctgctaaatcggaagaggaaattttcgaacatctggggcttgaatacctggaaccgttctatcgtaacgca

SEQ ID NO: 5252 - protein, 529 aa, synthetic construct
  REGION 1..529: note = Variant of terminal deoxynucleotidyltransferase
MHHHHHHGGSGSHGIRTIDSDFGKKQQKKGDNHDSSATYEIKFHEFVLFILEEKMGATRRTFLTDLARKKGFRVENELTDEVTHIVAENLSRSEVLAWLKEHKMEKTKQFELLDISWLIESMKVGKPVDTKGKYQLAESVEVSANPDPTEGRVNELPPTMKTVSPYACQRRTTLNNLNQRFTDSLEILRENYVFKGNDDTALEFRRAISVLKSLPFEVRSLKDTEGLPWISDEVKGIMEEIIEVGESREVQAVLNDEWYQSFHAFTRVFGVGVGTADKWYQMGLRTLEDVRSSKTLKLTTWAKVGLTYYEDLARGVTRAEADAIWLLVQDAVATFDPDAIVEIVGGQRRGKPQSHDVDLLISSPGAEKEQEDQLLQKVMNLWKKQGLLLCGKVVWSQWEWGGLPSGKADEGDGEASCFLILKLYDHLVRKSKHNMPTGSNMGESKPWKAIKVDLLRCPRGSFAFAMLQWTGSRMFRRDLRDYAREEKNMMLDNHSLYDMTRGIQLPAKSEEEIFEHLGLEYLEPFYRNA

SEQ ID NO: 5253 - DNA, 1587 bp, synthetic construct
  misc_feature 1..1587: note = Variant of terminal deoxynucleotidyltransferase
  source 1..1587: mol_type = other DNA
atgcaccatcatcatcatcatggcggtagcggcagccacggcattcgtaccatcgattcggacttcgggaagaaacagcagaaaaaaggcgataaccacgatagttccgccacttatgaaatcaaatttcacgagtttgtgctgttcattctcgaagaaaaaatgggtgcgacgcgtcgtacttttctgacagatttagcccgcaagaaagggttccgcgtcgagaatgaactgaccgacgaagttacccacatcgtggcagaaaatctgtcacgctctgaagtattggcttggctgaaagaacacaagatggagaagaccaagcaattcgaactgctggatattagctggcttatcgaaagcatgaaagttggtaaaccggtggacaccaaggggaaataccagttggcggaatcggttgaggtgagtgcgaacccagatccgacagaaggtcgtgtaaacgagctgcctcctactatgaaaaccgtttctccgtatgcgtgtcaacgccgcaccaccctgaacaaccgtaatctgcgttttacggactcgctggagattcttcgcgagaattacgtgtttaaaggcaacgacgatactgcgctggaatttcgtcgtgctatctccgtgctgaaaagccttccgtttgaggtacgtagcctgaaagacacggaaggattgccctggatcagtgatgaagtcaaagggattatggaagaaatcatcgaagtcggggagtcgcgtgaagtgcaggccgtgctcaatgatgagtggtatcaaagcttccacgcatttacgcgtgtctttggagtgggggtaggcacagcagacaagtggtaccagatgggtctgcgcaccctggaggatgttcgttccagcaagaccctgaagttgaccacgtgggcgaaagtaggtctgacgtattatgaagatcttgctcgcggcgttacccgtgcggaagctgacgcgatttggctgctggttcaggatgcagtcgcaactttcgacccggatgcgatcgtggagattgtcggtggacagcgtcgtgggaaacctcagtctcacgacgttgatctgcttatcagttctccgggagctgaaaaagagcaagaagaccaactcctgcagaaagtgatgaatctgtggaagaaacaagggttgttgctgtgtggtaaagtggtgtggagtcagtgggaatgggggggtctgccgtccggtaaggctgatgagggtgacggggaggcatcgtgctttctgatcctcaaactttatgatcatctggtgcgtaaaagtaaacataatatgccgactggttcgaacatgggcgagtccaaaccgtggaaagcaattaaagtagatctgctgcgttgcccccgcggcagttttgcgtttgcgatgttgcagtggaccggaagccgcatgttccgtcgcgatctgcgcgattacgcccgcgaagagaagaacatgatgctggacaatcatagcctgtatgacatgactcgtggtatccaactccctgctaaatcggaagaggaaattttcgaacatctggggcttgaatacctggaaccgttctatcgtaacgca

SEQ ID NO: 5254 - protein, 529 aa, synthetic construct
  REGION 1..529: note = Variant of terminal deoxynucleotidyltransferase
MHHHHHHGGSGSHGIRTIDSDFGKKQQKKGDNHDSSATYEIKFHEFVLFILEEKMGATRRTFLTDLARKKGFRVENELTDEVTHIVAENLSRSEVLAWLKEHKMEKTKQFELLDISWLIESMKVGKPVDTKGKYQLAESVEVSANPDPTEGRVNELPPTMKTVSPYACQRRTTLNNRNLRFTDSLEILRENYVFKGNDDTALEFRRAISVLKSLPFEVRSLKDTEGLPWISDEVKGIMEEIIEVGESREVQAVLNDEWYQSFHAFTRVFGVGVGTADKWYQMGLRTLEDVRSSKTLKLTTWAKVGLTYYEDLARGVTRAEADAIWLLVQDAVATFDPDAIVEIVGGQRRGKPQSHDVDLLISSPGAEKEQEDQLLQKVMNLWKKQGLLLCGKVVWSQWEWGGLPSGKADEGDGEASCFLILKLYDHLVRKSKHNMPTGSNMGESKPWKAIKVDLLRCPRGSFAFAMLQWTGSRMFRRDLRDYAREEKNMMLDNHSLYDMTRGIQLPAKSEEEIFEHLGLEYLEPFYRNA

SEQ ID NO: 5255 - DNA, 1587 bp, synthetic construct
  misc_feature 1..1587: note = Variant of terminal deoxynucleotidyltransferase
  source 1..1587: mol_type = other DNA
atgcaccatcatcatcatcatggcggtagcggcagccacggcattcgtaccatcgattcggacttcgggaagaaacagcagaaaaaaggcgataaccacgatagttccgccacttatgaaatcaaatttcacgagtttgtgctgttcattctcgaagaaaaaatgggtgcgacgcgtcgtacttttctgacagatttagcccgcaagaaagggttccgcgtcgagaatgaactgaccgacgaagttacccacatcgtggcagaaaatctgtcacgctctgaagtattggcttggctgaaagaacacaagatggagaagaccaagcaattcgaactgctggatattagctggcttatcgaaagcatgaaagttggtaaaccggtggacaccaaggggaaataccagttggcggaatcggttgaggtgagtgcgaacccagatccgacagaaggtcgtgtaaacgagctgcctcctactatgaaaaccgtttctccgtatgcgtgtcaacgccgcaccaccctgaacaaccgtaatcaacgttttacggactcgctggagattcttcgcgagaattacgtgtttaaaggcaacgacgatactgcgctggaatttcgtcgtgctatctccgtgctgaaaagccttccgtttgaggtacgtagcctgaaagacacggaaggattgccctggatcagtgatgaagtcaaagggattatggaagaaatcatcgaagtcggggagtcgcgtgaagtgcaggccgtgctcaatgatgagtggtatcaaagcttccacgcatttacgcgtgtctttggagtgggggtaggcacagcagacaagtggtaccagatgggtctgcgcaccctggaggatgttcgttccagcaagaccctgaagttgaccacgtgggcgaaagtaggtctgacgtattatgaagatcttgctcgcggcgttacccgtgcggaagctgacgcgatttggcagctggttcaggatgcagtcgcaactttcgacccggatgcgatcgtggagattgtcggtggacagcgtcgtgggaaacctcagtctcacgacgttgatctgcttatcagttctccgggagctgaaaaagagcaagaagaccaactcctgcagaaagtgatgaatctgtggaagaaacaagggttgttgctgtgtggtaaagtggtgtggagtcagtgggaatgggggggtctgccgtccggtaaggctgatgagggtgacggggaggcatcgtgctttctgatcctcaaactttatgatcatctggtgcgtaaaagtaaacataatatgccgactggttcgaacatgggcgagtccaaaccgtggaaagcaattaaagtagatctgctgcgttgcccccgcggcagttttgcgtttgcgatgttgcagtggaccggaagccgcatgttccgtcgcgatctgcgcgattacgcccgcgaagagaagaacatgatgctggacaatcatagcctgtatgacatgactcgtggtatccaactccctgctaaatcggaagaggaaattttcgaacatctggggcttgaatacctggaaccgttctatcgtaacgca

SEQ ID NO: 5256 - protein, 529 aa, synthetic construct
  REGION 1..529: note = Variant of terminal deoxynucleotidyltransferase
MHHHHHHGGSGSHGIRTIDSDFGKKQQKKGDNHDSSATYEIKFHEFVLFILEEKMGATRRTFLTDLARKKGFRVENELTDEVTHIVAENLSRSEVLAWLKEHKMEKTKQFELLDISWLIESMKVGKPVDTKGKYQLAESVEVSANPDPTEGRVNELPPTMKTVSPYACQRRTTLNNRNQRFTDSLEILRENYVFKGNDDTALEFRRAISVLKSLPFEVRSLKDTEGLPWISDEVKGIMEEIIEVGESREVQAVLNDEWYQSFHAFTRVFGVGVGTADKWYQMGLRTLEDVRSSKTLKLTTWAKVGLTYYEDLARGVTRAEADAIWQLVQDAVATFDPDAIVEIVGGQRRGKPQSHDVDLLISSPGAEKEQEDQLLQKVMNLWKKQGLLLCGKVVWSQWEWGGLPSGKADEGDGEASCFLILKLYDHLVRKSKHNMPTGSNMGESKPWKAIKVDLLRCPRGSFAFAMLQWTGSRMFRRDLRDYAREEKNMMLDNHSLYDMTRGIQLPAKSEEEIFEHLGLEYLEPFYRNA

SEQ ID NO: 5257 - DNA, 1587 bp, synthetic construct
  misc_feature 1..1587: note = Variant of terminal deoxynucleotidyltransferase
  source 1..1587: mol_type = other DNA
atgcaccatcatcatcatcatggcggtagcggcagccacggcattcgtaccatcgattcggacttcgggaagaaacagcagaaaaaaggcgataaccacgatagttccgccacttatgaaatcaaatttcacgagtttgtgctgttcattctcgaagaaaaaatgggtgcgacgcgtcgtacttttctgacagatttagcccgcaagaaagggttccgcgtcgagaatgaactgaccgacgaagttacccacatcgtggcagaaaatctgtcacgctctgaagtattggcttggctgaaagaacacaagatggagaagaccaagcaattcgaactgctggatattagctggcttatcgaaagcatgaaagttggtaaaccggtggacaccaaggggaaataccagttggcggaatcggttgaggtgagtgcgaacccagatccgacagaaggtcgtgtaaacgagctgcctcctactatgaaaaccgtttctccgtatgcgtgtcaacgccgcaccaccctgaacaaccgtaatcaacgttttacggactcgctggagattcttcgcgagaattacgtgtttaaaggcaacgacgatactgcgctggaatttcgtcgtgctatctccgtgctgaaaagccttccgtttgaggtacgtagcctgaaagacacggaaggattgccctggatcagtgatgaagtcaaagggattatggaagaaatcatcgaagtcggggagtcgcgtgaagtgcaggccgtgctcaatgatgagtggtatcaaagcttccacgcatttacgcgtgtctttggagtgggggtaggcacagcagacaagtggtaccagatgggtctgcgcaccctggaggatgttcgttccagcaagaccctgaagttgaccacgtgggcgaaagtaggtctgacgtattatgaagatcttgctcgcggcgttacccgtgcggaagctgacgcgatttggctgctggttcaggatgcagtcgcaactttcgacccggatgcgatcgtggagattgtcggtggacagcgtcgtgggaaacctcagtctcacgacgttgatctgcttatcagttctccgggagctgaaaaagagcaagaagaccaactcctgcagaaagtgatgaatctgtggaagaaacaagggttgttgctgtgtggtaaagtggtgtggagtcagtgggaatgggggggtctgccgtccggtaaggctgatgagggtgacggggaggcatcgtgctttctgatcctcaaactttatgatcatctggtgcgtcggagtaaacataatatgccgactggttcgaacatgggcgagtccaaaccgtggaaagcaattaaagtagatctgctgcgttgcccccgcggcagttttgcgtttgcgatgttgcagtggaccggaagccgcatgttccgtcgcgatctgcgcgattacgcccgcgaagagaagaacatgatgctggacaatcatagcctgtatgacatgactcgtggtatccaactccctgctaaatcggaagaggaaattttcgaacatctggggcttgaatacctggaaccgttctatcgtaacgca

SEQ ID NO: 5258 - protein, 529 aa, synthetic construct
  REGION 1..529: note = Variant of terminal deoxynucleotidyltransferase
MHHHHHHGGSGSHGIRTIDSDFGKKQQKKGDNHDSSATYEIKFHEFVLFILEEKMGATRRTFLTDLARKKGFRVENELTDEVTHIVAENLSRSEVLAWLKEHKMEKTKQFELLDISWLIESMKVGKPVDTKGKYQLAESVEVSANPDPTEGRVNELPPTMKTVSPYACQRRTTLNNRNQRFTDSLEILRENYVFKGNDDTALEFRRAISVLKSLPFEVRSLKDTEGLPWISDEVKGIMEEIIEVGESREVQAVLNDEWYQSFHAFTRVFGVGVGTADKWYQMGLRTLEDVRSSKTLKLTTWAKVGLTYYEDLARGVTRAEADAIWLLVQDAVATFDPDAIVEIVGGQRRGKPQSHDVDLLISSPGAEKEQEDQLLQKVMNLWKKQGLLLCGKVVWSQWEWGGLPSGKADEGDGEASCFLILKLYDHLVRRSKHNMPTGSNMGESKPWKAIKVDLLRCPRGSFAFAMLQWTGSRMFRRDLRDYAREEKNMMLDNHSLYDMTRGIQLPAKSEEEIFEHLGLEYLEPFYRNA

SEQ ID NO: 5259 - DNA, 1587 bp, synthetic construct
  misc_feature 1..1587: note = Variant of terminal deoxynucleotidyltransferase
  source 1..1587: mol_type = other DNA
atgcaccatcatcatcatcatggcggtagcggcagccacggcattcgtaccatcgattcggacttcgggaagaaacagcagaaaaaaggcgataaccacgatagttccgccacttatgaaatcaaatttcacgagtttgtgctgttcattctcgaagaaaaaatgggtgcgacgcgtcgtacttttctgacagatttagcccgcaagaaagggttccgcgtcgagaatgaactgaccgacgaagttacccacatcgtggcagaaaatctgtcacgctctgaagtattggcttggctgaaagaacacaagatggagaagaccaagcaattcgaactgctggatattagctggcttatcgaaagcatgaaagttggtaaaccggtggacaccaaggggaaataccagttggcggaatcggttgaggtgagtgcgaacccagatccgacagaaggtcgtgtaaacgagctgcctcctactatgaaaaccgtttctccgtatgcgtgtcaacgccgcaccaccctgaacaaccgtaatcaacgttttacggactcgctggagattcttcgcgagaattacgtgtttaaaggcaacgacgatactgcgctggaatttcgtcgtgctatctccgtgctgaaaagccttccgtttgaggtacgtagcctgaaagacacggaaggattgccctggatcagtgatgaagtcaaagggattatggaagaaatcatcgaagtcggggagtcgcgtgaagtgcaggccgtgctcaatgatgagtggtatcaaagcttccacgcatttacgcgtgtctttggagtgggggtaggcacagcagacaagtggtaccagatgggtctgcgcaccctggaggatgttcgttccagcaagaccctgaagttgaccacgtgggcgaaagtaggtctgacgtattatgaagatcttgctcgcggcgttacccgtgcggaagctgacgcgatttggctgctggttcaggatgcagtcgcaactttcgacccggatgcgatcgtggagattgtcggtggacagcgtcgtgggaaacctcagtctcacgacgttgatctgcttatcagttctccgggagctgaaaaagagcaagaagaccaactcctgcagaaagtgatgaatctgtggaagaaacaagggttgttgctgtgtggtaaagtggtgtggagtcagtgggaatgggggggtctgccgtccggtaaggctgatgagggtgacggggaggcatcgtgctttctgatcctcaaactttatgatcatctggtgcgtaaaagtaaacataatatgccgactggttcgaacatgggcgagtccaaaccgtggaaagcaattaaagtagatctgctgcgttgcccccgcggcagttttgcgtttgcgatgttgcagtggaccggaagccgcatgttccgtcgcgatctgcgcgattacgcccgcgaagagaagaacatgatgctggacaatcatagcctgtatgacatgactcgtggtatccaactccctgcttcgtcggaagaggaaattttcgaacatctggggcttgaatacctggaaccgttctatcgtaacgca

SEQ ID NO: 5260 - protein, 529 aa, synthetic construct
  REGION 1..529: note = Variant of terminal deoxynucleotidyltransferase
MHHHHHHGGSGSHGIRTIDSDFGKKQQKKGDNHDSSATYEIKFHEFVLFILEEKMGATRRTFLTDLARKKGFRVENELTDEVTHIVAENLSRSEVLAWLKEHKMEKTKQFELLDISWLIESMKVGKPVDTKGKYQLAESVEVSANPDPTEGRVNELPPTMKTVSPYACQRRTTLNNRNQRFTDSLEILRENYVFKGNDDTALEFRRAISVLKSLPFEVRSLKDTEGLPWISDEVKGIMEEIIEVGESREVQAVLNDEWYQSFHAFTRVFGVGVGTADKWYQMGLRTLEDVRSSKTLKLTTWAKVGLTYYEDLARGVTRAEADAIWLLVQDAVATFDPDAIVEIVGGQRRGKPQSHDVDLLISSPGAEKEQEDQLLQKVMNLWKKQGLLLCGKVVWSQWEWGGLPSGKADEGDGEASCFLILKLYDHLVRKSKHNMPTGSNMGESKPWKAIKVDLLRCPRGSFAFAMLQWTGSRMFRRDLRDYAREEKNMMLDNHSLYDMTRGIQLPASSEEEIFEHLGLEYLEPFYRNA

SEQ ID NO: 5261 - DNA, 1587 bp, synthetic construct
  misc_feature 1..1587: note = Variant of terminal deoxynucleotidyltransferase
  source 1..1587: mol_type = other DNA
atgcaccatcatcatcatcatggcggtagcggcagccacggcattcgtaccatcgattcggacttcgggaagaaacagcagaaaaaaggcgataaccacgatagttccgccacttatgaaatcaaatttcacgagtttgtgctgttcattctcgaagaaaaaatgggtgcgacgcgtcgtacttttctgacagatttagcccgcaagaaagggttccgcgtcgagaatgaactgaccgacgaagttacccacatcgtggcagaaaatctgtcacgctctgaagtattggcttggctgaaagaacacaagatggagaagaccaagcaattcgaactgctggatattagctggcttatcgaaagcatgaaagttggtaaaccggtggacaccaaggggaaataccagttggcggaatcggttgaggtgagtgcgaacccagatccgacagaaggtcgtgtaaacgagctgcctcctactatgaaaaccgtttctccgtatgcgtgtcaacgccgcaccaccctgaacaaccgtaatcaacgttttacggactcgctggagattcttcgcgagaattacgtgtttaaaggcaacgacgatactgcgctggaatttcgtcgtgctatctccgtgctgaaaagccttccgtttgaggtacgtagcctgaaagacacggaaggattgccctggatcagtgatgaagtcaaagggattatggaagaaatcatcgaagtcggggagtcgcgtgaagtgcaggccgtgctcaatgatgagtggtatcaaagcttccacgcatttacgcgtgtctttggagtgggggtaggcacagcagacaagtggtaccagatgggtctgcgcaccctggaggatgttcgttccagcaagaccctgaagttgaccacgtgggcgaaagtaggtctgacgtattatgaagatcttgctcgcggcgttacccgtgcggaagctgacgcgatttggctgctggttcaggatgcagtcgcaactttcgacccggatgcgatcgtggagattgtcggtggacagcgtcgtgggaaacctcagtctcacgacgttgatctgcttatcagttctccgggagctgaaaaagagcaagaagaccaactcctgcagaaagtgatgaatctgtggaagaaacaagggttgttgctgtgtggtaaagtggtgtggagtcagtgggaatgggggggtgtgccgtccggtaaggctgatgagggtgacggggaggcatcgtgctttctgatcctcaaactttatgatcatctggtgcgtaaaagtaaacataatatgccgactggttcgaacatgggcgagtccaaaccgtggaaagcaattaaagtagatctgctgcgttgcccccgcggcagttttgcgtttgcgatgttgcagtggaccggaagccgcatgttccgtcgcgatctgcgcgattacgcccgcgaagagaagaacatgatgctggacaatcatagcctgtatgacatgactcgtggtatccaactccctgctaaatcggaagaggaaattttcgaacatctggggcttgaatacctggaaccgttctatcgtaacgca

SEQ ID NO: 5262 - protein, 529 aa, synthetic construct
  REGION 1..529: note = Variant of terminal deoxynucleotidyltransferase
MHHHHHHGGSGSHGIRTIDSDFGKKQQKKGDNHDSSATYEIKFHEFVLFILEEKMGATRRTFLTDLARKKGFRVENELTDEVTHIVAENLSRSEVLAWLKEHKMEKTKQFELLDISWLIESMKVGKPVDTKGKYQLAESVEVSANPDPTEGRVNELPPTMKTVSPYACQRRTTLNNRNQRFTDSLEILRENYVFKGNDDTALEFRRAISVLKSLPFEVRSLKDTEGLPWISDEVKGIMEEIIEVGESREVQAVLNDEWYQSFHAFTRVFGVGVGTADKWYQMGLRTLEDVRSSKTLKLTTWAKVGLTYYEDLARGVTRAEADAIWLLVQDAVATFDPDAIVEIVGGQRRGKPQSHDVDLLISSPGAEKEQEDQLLQKVMNLWKKQGLLLCGKVVWSQWEWGGVPSGKADEGDGEASCFLILKLYDHLVRKSKHNMPTGSNMGESKPWKAIKVDLLRCPRGSFAFAMLQWTGSRMFRRDLRDYAREEKNMMLDNHSLYDMTRGIQLPAKSEEEIFEHLGLEYLEPFYRNA

SEQ ID NO: 5263 - DNA, 1587 bp, synthetic construct
  misc_feature 1..1587: note = Variant of terminal deoxynucleotidyltransferase
  source 1..1587: mol_type = other DNA
atgcaccatcatcatcatcatggcggtagcggcagccacggcattcgtaccatcgattcggacttcgggaagaaacagcagaaaaaaggcgataaccacgatagttccgccacttatgaaatcaaatttcacgagtttgtgctgttcattctcgaagaaaaaatgggtgcgacgcgtcgtacttttctgacagatttagcccgcaagaaagggttccgcgtcgagaatgaactgaccgacgaagttacccacatcgtggcagaaaatctgtcacgctctgaagtattggcttggctgaaagaacacaagatggagaagaccaagcaattcgaactgctggatattagctggcttatcgaaagcatgaaagttggtaaaccggtggacaccaaggggaaataccagttggcggaatcggttgaggtgagtgcgaacccagatccgacagaaggtcgtgtaaacgagctgcctcctactatgaaaaccgtttctccgtatgcgtgtcaacgccgcaccaccctgaacaaccgtaatcaacgttttacggactcgctggagattcttcgcgagaattacgtgtttaaaggcaacgacgatactgcgctggaatttcgtcgtgctatctccgtgctgaaaagccttccgtttgaggtacgtagcctgaaagacacggaaggattgccctggatcagtgatgaagtcaaagggattatggaagaaatcatcgaagtcggggagtcgcgtgaagtgcaggccgtgctcaatgatgagtggtatcaaagcttccacgcatttacgcgtgtctttggagtgggggtaggcacagcagacaagtggtaccagatgggtctgcgcaccctggaggatgttcgttccagcaagaccctgaagttgaccacgtgggcgaaagtaggtctgacgtattatgaagatcttgctcgcggcgttacccgtgcggaagctgacgcgatttggctgctggttcaggatgcagtcgcaactttcgacccggatgcgatcgtggagattgtcggtggacagcgtcgtgggaaacctcagtctcacgacgttgatctgcttatcagttctccgggagctgaaaaagagcaagaagaccaactcctgcagaaagtgatgaatctgtggaagaaacaagggttgttgctgtgtggtaaagtgttttggagtcagtgggaatgggggggtctgccgtccggtaaggctgatgagggtgacggggaggcatcgtgctttctgatcctcaaactttatgatcatctggtgcgtaaaagtaaacataatatgccgactggttcgaacatgggcgagtccaaaccgtggaaagcaattaaagtagatctgctgcgttgcccccgcggcagttttgcgtttgcgatgttgcagtggaccggaagccgcatgttccgtcgcgatctgcgcgattacgcccgcgaagagaagaacatgatgctggacaatcatagcctgtatgacatgactcgtggtatccaactccctgctaaatcggaagaggaaattttcgaacatctggggcttgaatacctggaaccgttctatcgtaacgca

SEQ ID NO: 5264 - protein, 529 aa, synthetic construct
  REGION 1..529: note = Variant of terminal deoxynucleotidyltransferase
MHHHHHHGGSGSHGIRTIDSDFGKKQQKKGDNHDSSATYEIKFHEFVLFILEEKMGATRRTFLTDLARKKGFRVENELTDEVTHIVAENLSRSEVLAWLKEHKMEKTKQFELLDISWLIESMKVGKPVDTKGKYQLAESVEVSANPDPTEGRVNELPPTMKTVSPYACQRRTTLNNRNQRFTDSLEILRENYVFKGNDDTALEFRRAISVLKSLPFEVRSLKDTEGLPWISDEVKGIMEEIIEVGESREVQAVLNDEWYQSFHAFTRVFGVGVGTADKWYQMGLRTLEDVRSSKTLKLTTWAKVGLTYYEDLARGVTRAEADAIWLLVQDAVATFDPDAIVEIVGGQRRGKPQSHDVDLLISSPGAEKEQEDQLLQKVMNLWKKQGLLLCGKVFWSQWEWGGLPSGKADEGDGEASCFLILKLYDHLVRKSKHNMPTGSNMGESKPWKAIKVDLLRCPRGSFAFAMLQWTGSRMFRRDLRDYAREEKNMMLDNHSLYDMTRGIQLPAKSEEEIFEHLGLEYLEPFYRNA

SEQ ID NO: 5265 - DNA, 1587 bp, synthetic construct
  misc_feature 1..1587: note = Variant of terminal deoxynucleotidyltransferase
  source 1..1587: mol_type = other DNA
atgcaccatcatcatcatcatggcggtagcggcagccacggcattcgtaccatcgattcggacttcgggaagaaacagcagaaaaaaggcgataaccacgatagttccgccacttatgaaatcaaatttcacgagtttgtgctgttcattctcgaagaaaaaatgggtgcgacgcgtcgtacttttctgacagatttagcccgcaagaaagggttccgcgtcgagaatgaactgaccgacgaagttacccacatcgtggcagaaaatctgtcacgctctgaagtattggcttggctgaaagaacacaagatggagaagaccaagcaattcgaactgctggatattagctggcttatcgaaagcatgaaagttggtaaaccggtggacaccaaggggaaataccagttggcggaatcggttgaggtgagtgcgaacccagatccgacagaaggtcgtgtaaacgagctgcctcctactatgaaaaccgtttctccgtatgcgtgtcaacgccgcaccaccctgaacaaccgtaatcaacgttttacggactcgctggagattcttcgcgagaattacgtgtttaaaggcaacgacgatactgcgctggaatttcgtcgtgctatctccgtgctgaaaagccttccgtttgaggtacgtagcctgaaagacacggaaggattgccctggatcagtgatgaagtcaaagggattatggaagaaatcatcgaagtcggggagtcgcgtgaagtgcaggccgtgctcaatgatgagtggtatcaaagcttccacgcatttacgcgtgtctttggagtgggggtaggcacagcagacaagtggtaccagatgggtctgcgcaccctggaggatgttcgttccagcaagaccctgaagttgaccacgtgggcgaaagtaggtctgacgtattatgaagatcttgctcgcggcgttacccgtgcggaagctgacgcgatttggctgctggttcaggatgcagtcgcaactttcgacccggatgcgatcgtggagattgtcggtggacagcgtcgtgggaaacctcagtctcacgacgttgatctgcttatcagttctccgggagctgaaaaagagcaagaagaccaactcctgcagaaagtgatgaatctgtggaagaaacaagggttgttgctgtgtggtaaagtggtgtggagtcagtgggaatgggggggtctgccgtccggtaaggctgatgagggtgacggggaggcatcgtgctttctgatcctcaaactttatgatcatctggtgcgtaaaagtaaacataatatgccgactggttcgaacatgggcgagtccaaaccgtggaaagcaattaaagtagatctgctgcgttgcccccgcggcagttttgcgtttgcgatgttgcagtggaccggaagccgcatgttccgtcgcgatctgcgcgattacgcccgcgaagagaagaacatgatgctggacaatcatagcctgtatgacatgactcgtggtatccaactccctgctaaatcggaagaggaaattttcgaacatctggggcttatttacctggaaccgttcgaacgtaacgca

SEQ ID NO: 5266 - protein, 529 aa, synthetic construct
  REGION 1..529: note = Variant of terminal deoxynucleotidyltransferase
MHHHHHHGGSGSHGIRTIDSDFGKKQQKKGDNHDSSATYEIKFHEFVLFILEEKMGATRRTFLTDLARKKGFRVENELTDEVTHIVAENLSRSEVLAWLKEHKMEKTKQFELLDISWLIESMKVGKPVDTKGKYQLAESVEVSANPDPTEGRVNELPPTMKTVSPYACQRRTTLNNRNQRFTDSLEILRENYVFKGNDDTALEFRRAISVLKSLPFEVRSLKDTEGLPWISDEVKGIMEEIIEVGESREVQAVLNDEWYQSFHAFTRVFGVGVGTADKWYQMGLRTLEDVRSSKTLKLTTWAKVGLTYYEDLARGVTRAEADAIWLLVQDAVATFDPDAIVEIVGGQRRGKPQSHDVDLLISSPGAEKEQEDQLLQKVMNLWKKQGLLLCGKVVWSQWEWGGLPSGKADEGDGEASCFLILKLYDHLVRKSKHNMPTGSNMGESKPWKAIKVDLLRCPRGSFAFAMLQWTGSRMFRRDLRDYAREEKNMMLDNHSLYDMTRGIQLPAKSEEEIFEHLGLIYLEPFERNA

SEQ ID NO: 5267 - DNA, 1587 bp, synthetic construct
  misc_feature 1..1587: note = Variant of terminal deoxynucleotidyltransferase
  source 1..1587: mol_type = other DNA
atgcaccatcatcatcatcatggcggtagcggcagccacggcattcgtaccatcgattcggacttcgggaagaaacagcagaaaaaaggcgataaccacgatagttccgccacttatgaaatcaaatttcacgagtttgtgctgttcattctcgaagaaaaaatgggtgcgacgcgtcgtacttttctgacagatttagcccgcaagaaagggttccgcgtcgagaatgaactgaccgacgaagttacccacatcgtggcagaaaatctgtcacgctctgaagtattggcttggctgaaagaacacaagatggagaagaccaagcaattcgaactgctggatattagctggcttatcgaaagcatgaaagttggtaaaccggtggacaccaaggggaaataccagttggcggaatcggttgaggtgagtgcgaacccagatccgacagaaggtcgtgtaaacgagctgcctcctactatgaaaaccgtttctccgtatgcgtgtcaacgccgcaccaccctgaacaaccgtaatcaacgttttacggactcgctggagattcttcgcgagaattacgtgtttaaaggcaacgacgatgctgcgctggaatttcgtcgtgctatctccgtgctgaaaagccttccgtttgaggtacgtagcctgaaagacacggaaggattgccctggatcagtgatgaagtcaaagggattatggaagaaatcatcgaagtcggggagtcgcgtgaagtgcaggccgtgctcaatgatgagtggtatcaaagcttccacgcatttacgcgtgtctttggagtgggggtaggcacagcagacaagtggtaccagatgggtctgcgcaccctggaggatgttcgttccagcaagaccctgaagttgaccacgtgggcgaaagtaggtctgacgtattatgaagatcttgctcgcggcgttacccgtgcggaagctgacgcgatttggctgctggttcaggatgcagtcgcaactttcgacccggatgcgatcgtggagattgtcggtggacagcgtcgtgggaaacctcagtctcacgacgttgatctgcttatcagttctccgggagctgaaaaagagcaagaagaccaactcctgcagaaagtgatgaatctgtggaagaaacaagggttgttgctgtgtggtaaagtggtgtggagtcagtgggaatgggggggtctgccgtccggtaaggctgatgagggtgacggggaggcatcgtgctttctgatcctcaaactttatgatcatctggtgcgtaaaagtaaacataatatgccgactggttcgaacatgggcgagtccaaaccgtggaaagcaattaaagtagatctgctgcgttgcccccgcggcagttttgcgtttgcgatgttgcagtggaccggaagccgcatgttccgtcgcgatctgcgcgattacgcccgcgaagagaagaacatgatgctggacaatcatagcctgtatgacatgactcgtggtatccaactccctgctaaatcggaagaggaaattttcgaacatctggggcttgaatacctggaaccgttctatcgtaacgca

SEQ ID NO: 5268 - protein, 529 aa, synthetic construct
  REGION 1..529: note = Variant of terminal deoxynucleotidyltransferase
MHHHHHHGGSGSHGIRTIDSDFGKKQQKKGDNHDSSATYEIKFHEFVLFILEEKMGATRRTFLTDLARKKGFRVENELTDEVTHIVAENLSRSEVLAWLKEHKMEKTKQFELLDISWLIESMKVGKPVDTKGKYQLAESVEVSANPDPTEGRVNELPPTMKTVSPYACQRRTTLNNRNQRFTDSLEILRENYVFKGNDDAALEFRRAISVLKSLPFEVRSLKDTEGLPWISDEVKGIMEEIIEVGESREVQAVLNDEWYQSFHAFTRVFGVGVGTADKWYQMGLRTLEDVRSSKTLKLTTWAKVGLTYYEDLARGVTRAEADAIWLLVQDAVATFDPDAIVEIVGGQRRGKPQSHDVDLLISSPGAEKEQEDQLLQKVMNLWKKQGLLLCGKVVWSQWEWGGLPSGKADEGDGEASCFLILKLYDHLVRKSKHNMPTGSNMGESKPWKAIKVDLLRCPRGSFAFAMLQWTGSRMFRRDLRDYAREEKNMMLDNHSLYDMTRGIQLPAKSEEEIFEHLGLEYLEPFYRNA

SEQ ID NO: 5269 - DNA, 1587 bp, synthetic construct
  misc_feature 1..1587: note = Variant of terminal deoxynucleotidyltransferase
  source 1..1587: mol_type = other DNA
atgcaccatcatcatcatcatggcggtagcggcagccacggcattcgtaccatcgattcggacttcgggaagaaacagcagaaaaaaggcgataaccacgatagttccgccacttatgaaatcaaatttcacgagtttgtgctgttcattctcgaagaaaaaatgggtgcgacgcgtcgtacttttctgacagatttagcccgcaagaaagggttccgcgtcgagaatgaactgaccgacgaagttacccacatcgtggcagaaaatctgtcacgctctgaagtattggcttggctgaaagaacacaagatggagaagaccaagcaattcgaactgctggatattagctggcttatcgaaagcatgaaagttggtaaaccggtggacaccaaggggaaataccagttggcggaatcggttgaggtgagtgcgaacccagatccgacagaaggtcgtgtaaacgagctgcctcctactatgaaaaccgtttctccgtatgcgtgtcaacgccgcaccaccctgaacaaccgtaatcaacgttttacggactcgctggagattcttcgcgagaattacgtgtttaaaggcaacgacgatagggcgctggaatttcgtcgtgctatctccgtgctgaaaagccttccgtttgaggtacgtagcctgaaagacacggaaggattgccctggatcagtgatgaagtcaaagggattatggaagaaatcatcgaagtcggggagtcgcgtgaagtgcaggccgtgctcaatgatgagtggtatcaaagcttccacgcatttacgcgtgtctttggagtgggggtaggcacagcagacaagtggtaccagatgggtctgcgcaccctggaggatgttcgttccagcaagaccctgaagttgaccacgtgggcgaaagtaggtctgacgtattatgaagatcttgctcgcggcgttacccgtgcggaagctgacgcgatttggctgctggttcaggatgcagtcgcaactttcgacccggatgcgatcgtggagattgtcggtggacagcgtcgtgggaaacctcagtctcacgacgttgatctgcttatcagttctccgggagctgaaaaagagcaagaagaccaactcctgcagaaagtgatgaatctgtggaagaaacaagggttgttgctgtgtggtaaagtggtgtggagtcagtgggaatgggggggtctgccgtccggtaaggctgatgagggtgacggggaggcatcgtgctttctgatcctcaaactttatgatcatctggtgcgtaaaagtaaacataatatgccgactggttcgaacatgggcgagtccaaaccgtggaaagcaattaaagtagatctgctgcgttgcccccgcggcagttttgcgtttgcgatgttgcagtggaccggaagccgcatgttccgtcgcgatctgcgcgattacgcccgcgaagagaagaacatgatgctggacaatcatagcctgtatgacatgactcgtggtatccaactccctgctaaatcggaagaggaaattttcgaacatctggggcttgaatacctggaaccgttctatcgtaacgca

SEQ ID NO: 5270 - protein, 529 aa, synthetic construct
  REGION 1..529: note = Variant of terminal deoxynucleotidyltransferase
MHHHHHHGGSGSHGIRTIDSDFGKKQQKKGDNHDSSATYEIKFHEFVLFILEEKMGATRRTFLTDLARKKGFRVENELTDEVTHIVAENLSRSEVLAWLKEHKMEKTKQFELLDISWLIESMKVGKPVDTKGKYQLAESVEVSANPDPTEGRVNELPPTMKTVSPYACQRRTTLNNRNQRFTDSLEILRENYVFKGNDDRALEFRRAISVLKSLPFEVRSLKDTEGLPWISDEVKGIMEEIIEVGESREVQAVLNDEWYQSFHAFTRVFGVGVGTADKWYQMGLRTLEDVRSSKTLKLTTWAKVGLTYYEDLARGVTRAEADAIWLLVQDAVATFDPDAIVEIVGGQRRGKPQSHDVDLLISSPGAEKEQEDQLLQKVMNLWKKQGLLLCGKVVWSQWEWGGLPSGKADEGDGEASCFLILKLYDHLVRKSKHNMPTGSNMGESKPWKAIKVDLLRCPRGSFAFAMLQWTGSRMFRRDLRDYAREEKNMMLDNHSLYDMTRGIQLPAKSEEEIFEHLGLEYLEPFYRNA

SEQ ID NO: 5271 - DNA, 1587 bp, synthetic construct
  misc_feature 1..1587: note = Variant of terminal deoxynucleotidyltransferase
  source 1..1587: mol_type = other DNA
atgcaccatcatcatcatcatggcggtagcggcagccacggcattcgtaccatcgattcggacttcgggaagaaacagcagaaaaaaggcgataaccacgatagttccgccacttatgaaatcaaatttcacgagtttgtgctgttcattctcgaagaaaaaatgggtgcgacgcgtcgtacttttctgacagatttagcccgcaagaaagggttccgcgtcgagaatgaactgaccgacgaagttacccacatcgtggcagaaaatctgtcacgctctgaagtattggcttggctgaaagaacacaagatggagaagaccaagcaattcgaactgctggatattagctggcttatcgaaagcatgaaagttggtaaaccggtggacaccaaggggaaataccagttggcggaatcggttgaggtgagtgcgaacccagatccgacagaaggtcgtgtaaacgagctgcctcctactatgaaaaccgtttctccgtatgcgtgtcaacgccgcaccaccctgaacaaccgtaatcaacgttttacggactcgctggagattcttcgcgagaattacgtgtttaaaggcaacgacgatactgcgctggaatttcgtcgtgctatctccgtgctgaaaagccttccgtttgaggtacgtagcctgaaagacacggaaggattgccctggatcagtgatgaagtcaaagggattatggaagaaatcatcgaagtcggggagtcgcgtgaagtgcaggccgtgctcaatgatgagtggtatcaaagcttccacgcatttacgcgtgtctttggagtgggggtaggcacagcagacaagtggtaccagatgggtctgcgcaccctggaggatgttcgttccagcaagcatctgaagttgaccacgtgggcgaaagtaggtctgacgtattatgaagatcttgctcgcggcgttacccgtgcggaagctgacgcgatttggctgctggttcaggatgcagtcgcaactttcgacccggatgcgatcgtggagattgtcggtggacagcgtcgtgggaaacctcagtctcacgacgttgatctgcttatcagttctccgggagctgaaaaagagcaagaagaccaactcctgcagaaagtgatgaatctgtggaagaaacaagggttgttgctgtgtggtaaagtggtgtggagtcagtgggaatgggggggtctgccgtccggtaaggctgatgagggtgacggggaggcatcgtgctttctgatcctcaaactttatgatcatctggtgcgtaaaagtaaacataatatgccgactggttcgaacatgggcgagtccaaaccgtggaaagcaattaaagtagatctgctgcgttgcccccgcggcagttttgcgtttgcgatgttgcagtggaccggaagccgcatgttccgtcgcgatctgcgcgattacgcccgcgaagagaagaacatgatgctggacaatcatagcctgtatgacatgactcgtggtatccaactccctgctaaatcggaagaggaaattttcgaacatctggggcttgaatacctggaaccgttctatcgtaacgca

SEQ ID NO: 5272 - protein, 529 aa, synthetic construct
  REGION 1..529: note = Variant of terminal deoxynucleotidyltransferase
MHHHHHHGGSGSHGIRTIDSDFGKKQQKKGDNHDSSATYEIKFHEFVLFILEEKMGATRRTFLTDLARKKGFRVENELTDEVTHIVAENLSRSEVLAWLKEHKMEKTKQFELLDISWLIESMKVGKPVDTKGKYQLAESVEVSANPDPTEGRVNELPPTMKTVSPYACQRRTTLNNRNQRFTDSLEILRENYVFKGNDDTALEFRRAISVLKSLPFEVRSLKDTEGLPWISDEVKGIMEEIIEVGESREVQAVLNDEWYQSFHAFTRVFGVGVGTADKWYQMGLRTLEDVRSSKHLKLTTWAKVGLTYYEDLARGVTRAEADAIWLLVQDAVATFDPDAIVEIVGGQRRGKPQSHDVDLLISSPGAEKEQEDQLLQKVMNLWKKQGLLLCGKVVWSQWEWGGLPSGKADEGDGEASCFLILKLYDHLVRKSKHNMPTGSNMGESKPWKAIKVDLLRCPRGSFAFAMLQWTGSRMFRRDLRDYAREEKNMMLDNHSLYDMTRGIQLPAKSEEEIFEHLGLEYLEPFYRNA

SEQ ID NO: 5273 - DNA, 1587 bp, synthetic construct
  misc_feature 1..1587: note = Variant of terminal deoxynucleotidyltransferase
  source 1..1587: mol_type = other DNA
atgcaccatcatcatcatcatggcggtagcggcagccacggcattcgtaccatcgattcggacttcgggaagaaacagcagaaaaaaggcgataaccacgatagttccgccacttatgaaatcaaatttcacgagtttgtgctgttcattctcgaagaaaaaatgggtgcgacgcgtcgtacttttctgacagatttagcccgcaagaaagggttccgcgtcgagaatgaactgaccgacgaagttacccacatcgtggcagaaaatctgtcacgctctgaagtattggcttggctgaaagaacacaagatggagaagaccaagcaattcgaactgctggatattagctggcttatcgaaagcatgaaagttggtaaaccggtggacaccaaggggaaataccagttggcggaatcggttgaggtgagtgcgaacccagatccgacagaaggtcgtgtaaacgagctgcctcctactatgaaaaccgtttctccgtatgcgtgtcaacgccgcaccaccctgaacaaccgtaatcaacgttttacggactcgctggagattcttcgcgagaattacgtgtttaaaggcaacctggatactgcgctggaatttcgtcgtgctatctccgtgctgaaaagccttccgtttgaggtacgtagcctgaaagacacggaaggattgccctggatcagtgatgaagtcaaagggattatggaagaaatcatcgaagtcggggagtcgcgtgaagtgcaggccgtgctcaatgatgagtggtatcaaagcttccacgcatttacgcgtgtctttggagtgggggtaggcacagcagacaagtggtaccagatgggtctgcgcaccctggaggatgttcgttccagcaagaccctgaagttgaccacgtgggcgaaagtaggtctgacgtattatgaagatcttgctcgcggcgttacccgtgcggaagctgacgcgatttggctgctggttcaggatgcagtcgcaactttcgacccggatgcgatcgtggagattgtcggtggacagcgtcgtgggaaacctcagtctcacgacgttgatctgcttatcagttctccgggagctgaaaaagagcaagaagaccaactcctgcagaaagtgatgaatctgtggaagaaacaagggttgttgctgtgtggtaaagtggtgtggagtcagtgggaatgggggggtctgccgtccggtaaggctgatgagggtgacggggaggcatcgtgctttctgatcctcaaactttatgatcatctggtgcgtaaaagtaaacataatatgccgactggttcgaacatgggcgagtccaaaccgtggaaagcaattaaagtagatctgctgcgttgcccccgcggcagttttgcgtttgcgatgttgcagtggaccggaagccgcatgttccgtcgcgatctgcgcgattacgcccgcgaagagaagaacatgatgctggacaatcatagcctgtatgacatgactcgtggtatccaactccctgctaaatcggaagaggaaattttcgaacatctggggcttgaatacctggaaccgttctatcgtaacgca

SEQ ID NO: 5274 - protein, 529 aa, synthetic construct
  REGION 1..529: note = Variant of terminal deoxynucleotidyltransferase
MHHHHHHGGSGSHGIRTIDSDFGKKQQKKGDNHDSSATYEIKFHEFVLFILEEKMGATRRTFLTDLARKKGFRVENELTDEVTHIVAENLSRSEVLAWLKEHKMEKTKQFELLDISWLIESMKVGKPVDTKGKYQLAESVEVSANPDPTEGRVNELPPTMKTVSPYACQRRTTLNNRNQRFTDSLEILRENYVFKGNLDTALEFRRAISVLKSLPFEVRSLKDTEGLPWISDEVKGIMEEIIEVGESREVQAVLNDEWYQSFHAFTRVFGVGVGTADKWYQMGLRTLEDVRSSKTLKLTTWAKVGLTYYEDLARGVTRAEADAIWLLVQDAVATFDPDAIVEIVGGQRRGKPQSHDVDLLISSPGAEKEQEDQLLQKVMNLWKKQGLLLCGKVVWSQWEWGGLPSGKADEGDGEASCFLILKLYDHLVRKSKHNMPTGSNMGESKPWKAIKVDLLRCPRGSFAFAMLQWTGSRMFRRDLRDYAREEKNMMLDNHSLYDMTRGIQLPAKSEEEIFEHLGLEYLEPFYRNA

SEQ ID NO: 5275 - DNA, 1587 bp, synthetic construct
  misc_feature 1..1587: note = Variant of terminal deoxynucleotidyltransferase
  source 1..1587: mol_type = other DNA
atgcaccatcatcatcatcatggcggtagcggcagccacggcattcgtaccatcgattcggacttcgggaagaaacagcagaaaaaaggcgataaccacgatagttccgccacttatgaaatcaaatttcacgagtttgtgctgttcattctcgaagaaaaaatgggtgcgacgcgtcgtacttttctgacagatttagcccgcaagaaagggttccgcgtcgagaatgaactgaccgacgaagttacccacatcgtggcagaaaatctgtcacgctctgaagtattggcttggctgaaagaacacaagatggagaagaccaagcaattcgaactgctggatattagctggcttatcgaaagcatgaaagttggtaaaccggtggacaccaaggggaaataccagttggcggaatcggttgaggtgagtgcgaacccagatccgacagaaggtcgtgtaaacgagctgcctcctactatgaaaaccgtttctccgtatgcgtgtcaacgccgcaccaccctgaacaaccgtaatcaacgttttacggactcgctggagattcttcgcgagaattacgtgtttaaaggcaacgacgataaggcgctggaatttcgtcgtgctatctccgtgctgaaaagccttccgtttgaggtacgtagcctgaaagacacggaaggattgccctggatcagtgatgaagtcaaagggattatggaagaaatcatcgaagtcggggagtcgcgtgaagtgcaggccgtgctcaatgatgagtggtatcaaagcttccacgcatttacgcgtgtctttggagtgggggtaggcacagcagacaagtggtaccagatgggtctgcgcaccctggaggatgttcgttccagcaagaccctgaagttgaccacgtgggcgaaagtaggtctgacgtattatgaagatcttgctcgcggcgttacccgtgcggaagctgacgcgatttggctgctggttcaggatgcagtcgcaactttcgacccggatgcgatcgtggagattgtcggtggacagcgtcgtgggaaacctcagtctcacgacgttgatctgcttatcagttctccgggagctgaaaaagagcaagaagaccaactcctgcagaaagtgatgaatctgtggaagaaacaagggttgttgctgtgtggtaaagtggtgtggagtcagtgggaatgggggggtctgccgtccggtaaggctgatgagggtgacggggaggcatcgtgctttctgatcctcaaactttatgatcatctggtgcgtaaaagtaaacataatatgccgactggttcgaacatgggcgagtccaaaccgtggaaagcaattaaagtagatctgctgcgttgcccccgcggcagttttgcgtttgcgatgttgcagtggaccggaagccgcatgttccgtcgcgatctgcgcgattacgcccgcgaagagaagaacatgatgctggacaatcatagcctgtatgacatgactcgtggtatccaactccctgctaaatcggaagaggaaattttcgaacatctggggcttgaatacctggaaccgttctatcgtaacgca

SEQ ID NO: 5276 - protein, 529 aa, synthetic construct
  REGION 1..529: note = Variant of terminal deoxynucleotidyltransferase
MHHHHHHGGSGSHGIRTIDSDFGKKQQKKGDNHDSSATYEIKFHEFVLFILEEKMGATRRTFLTDLARKKGFRVENELTDEVTHIVAENLSRSEVLAWLKEHKMEKTKQFELLDISWLIESMKVGKPVDTKGKYQLAESVEVSANPDPTEGRVNELPPTMKTVSPYACQRRTTLNNRNQRFTDSLEILRENYVFKGNDDKALEFRRAISVLKSLPFEVRSLKDTEGLPWISDEVKGIMEEIIEVGESREVQAVLNDEWYQSFHAFTRVFGVGVGTADKWYQMGLRTLEDVRSSKTLKLTTWAKVGLTYYEDLARGVTRAEADAIWLLVQDAVATFDPDAIVEIVGGQRRGKPQSHDVDLLISSPGAEKEQEDQLLQKVMNLWKKQGLLLCGKVVWSQWEWGGLPSGKADEGDGEASCFLILKLYDHLVRKSKHNMPTGSNMGESKPWKAIKVDLLRCPRGSFAFAMLQWTGSRMFRRDLRDYAREEKNMMLDNHSLYDMTRGIQLPAKSEEEIFEHLGLEYLEPFYRNA

SEQ ID NO: 5277 - DNA, 1587 bp, synthetic construct
  misc_feature 1..1587: note = Variant of terminal deoxynucleotidyltransferase
  source 1..1587: mol_type = other DNA
atgcaccatcatcatcatcatggcggtagcggcagccacggcattcgtaccatcgattcggacttcgggaagaaacagcagaaaaaaggcgataaccacgatagttccgccacttatgaaatcaaatttcacgagtttgtgctgttcattctcgaagaaaaaatgggtgcgacgcgtcgtacttttctgacagatttagcccgcaagaaagggttccgcgtcgagaatgaactgaccgacgaagttacccacatcgtggcagaaaatctgtcacgctctgaagtattggcttggctgaaagaacacaagatggagaagaccaagcaattcgaactgctggatattagctggcttatcgaaagcatgaaagttggtaaaccggtggacaccaaggggaaataccagttggcggaatcggttgaggtgagtgcgaacccagatccgacagaaggtcgtgtaaacgagctgcctcctactatgaaaaccgtttctccgtatgcgtgtcaacgccgcaccaccctgaacaaccgtaatcaacgttttacggactcgctggagattcttcgcgagaattacaggtttaaaggcaacgacgatactgcgctggaatttcgtcgtgctatctccgtgctgaaaagccttccgtttgaggtacgtagcctgaaagacacggaaggattgccctggatcagtgatgaagtcaaagggattatggaagaaatcatcgaagtcggggagtcgcgtgaagtgcaggccgtgctcaatgatgagtggtatcaaagcttccacgcatttacgcgtgtctttggagtgggggtaggcacagcagacaagtggtaccagatgggtctgcgcaccctggaggatgttcgttccagcaagaccctgaagttgaccacgtgggcgaaagtaggtctgacgtattatgaagatcttgctcgcggcgttacccgtgcggaagctgacgcgatttggctgctggttcaggatgcagtcgcaactttcgacccggatgcgatcgtggagattgtcggtggacagcgtcgtgggaaacctcagtctcacgacgttgatctgcttatcagttctccgggagctgaaaaagagcaagaagaccaactcctgcagaaagtgatgaatctgtggaagaaacaagggttgttgctgtgtggtaaagtggtgtggagtcagtgggaatgggggggtctgccgtccggtaaggctgatgagggtgacggggaggcatcgtgctttctgatcctcaaactttatgatcatctggtgcgtaaaagtaaacataatatgccgactggttcgaacatgggcgagtccaaaccgtggaaagcaattaaagtagatctgctgcgttgcccccgcggcagttttgcgtttgcgatgttgcagtggaccggaagccgcatgttccgtcgcgatctgcgcgattacgcccgcgaagagaagaacatgatgctggacaatcatagcctgtatgacatgactcgtggtatccaactccctgctaaatcggaagaggaaattttcgaacatctggggcttgaatacctggaaccgttctatcgtaacgca

SEQ ID NO: 5278 - protein, 529 aa, synthetic construct
  REGION 1..529: note = Variant of terminal deoxynucleotidyltransferase
MHHHHHHGGSGSHGIRTIDSDFGKKQQKKGDNHDSSATYEIKFHEFVLFILEEKMGATRRTFLTDLARKKGFRVENELTDEVTHIVAENLSRSEVLAWLKEHKMEKTKQFELLDISWLIESMKVGKPVDTKGKYQLAESVEVSANPDPTEGRVNELPPTMKTVSPYACQRRTTLNNRNQRFTDSLEILRENYRFKGNDDTALEFRRAISVLKSLPFEVRSLKDTEGLPWISDEVKGIMEEIIEVGESREVQAVLNDEWYQSFHAFTRVFGVGVGTADKWYQMGLRTLEDVRSSKTLKLTTWAKVGLTYYEDLARGVTRAEADAIWLLVQDAVATFDPDAIVEIVGGQRRGKPQSHDVDLLISSPGAEKEQEDQLLQKVMNLWKKQGLLLCGKVVWSQWEWGGLPSGKADEGDGEASCFLILKLYDHLVRKSKHNMPTGSNMGESKPWKAIKVDLLRCPRGSFAFAMLQWTGSRMFRRDLRDYAREEKNMMLDNHSLYDMTRGIQLPAKSEEEIFEHLGLEYLEPFYRNA

SEQ ID NO: 5279 - DNA, 1587 bp, synthetic construct
  misc_feature 1..1587: note = Variant of terminal deoxynucleotidyltransferase
  source 1..1587: mol_type = other DNA
atgcaccatcatcatcatcatggcggtagcggcagccacggcattcgtaccatcgattcggacttcgggaagaaacagcagaaaaaaggcgataaccacgatagttccgccacttatgaaatcaaatttcacgagtttgtgctgttcattctcgaagaaaaaatgggtgcgacgcgtcgtacttttctgacagatttagcccgcaagaaagggttccgcgtcgagaatgaactgaccgacgaagttacccacatcgtggcagaaaatctgtcacgctctgaagtattggcttggctgaaagaacacaagatggagaagaccaagcaattcgaactgctggatattagctggcttatcgaaagcatgaaagttggtaaaccggtggacaccaaggggaaataccagttggcggaatcggttgaggtgagtgcgaacccagatccgacagaaggtcgtgtaaacgagctgcctcctactatgaaaaccgtttctccgtatgcgtgtcaacgccgcaccaccctgaacaaccgtaatcaacgttttacggactcgctggagattcttcgcgagaattacgtgtttaaaggcaacgacgatactgcgctggaatttcgtcgtgctatctccgtgctgaaaagccttccgtttgaggtacgtagcctgaaagacacggaaggattgccctggatcagtgatgaagtcaaagggattatggaagaaatcatcgaagtcggggagtcgcgtgaagtgcaggccgtgctcaatgatgagtggtatcaaagcttccacgcatttacgcgtgtctttggagtgggggtaggcacagcagacaagtggtaccagatgggtctgcgcaccctggaggatgttcgttccagcaagaccctgaagttgaccacgtgggcgaaagtaggtctgacgtattatgaagatcttgctcgcggcgttacccgtgcggaagctgacgcgatttggctgctggttcaggatgcagtcgcaactttcgacccggatgcgatcgtggagattgtcggtggacagcgtcgtgggaaacctcagtctcacgacgttgatctgcttatcagttctccgggagctgaaaaagagcaagaagaccaactcctgcagaaagtgatgaatctgtggcataaacaagggttgttgctgtgtggtaaagtggtgtggagtcagtgggaatgggggggtctgccgtccggtaaggctgatgagggtgacggggaggcatcgtgctttctgatcctcaaactttatgatcatctggtgcgtaaaagtaaacataatatgccgactggttcgaacatgggcgagtccaaaccgtggaaagcaattaaagtagatctgctgcgttgcccccgcggcagttttgcgtttgcgatgttgcagtggaccggaagccgcatgttccgtcgcgatctgcgcgattacgcccgcgaagagaagaacatgatgctggacaatcatagcctgtatgacatgactcgtggtatccaactccctgctaaatcggaagaggaaattttcgaacatctggggcttgaatacctggaaccgttctatcgtaacgca

SEQ ID NO: 5280 - protein, 529 aa, synthetic construct
  REGION 1..529: note = Variant of terminal deoxynucleotidyltransferase
MHHHHHHGGSGSHGIRTIDSDFGKKQQKKGDNHDSSATYEIKFHEFVLFILEEKMGATRRTFLTDLARKKGFRVENELTDEVTHIVAENLSRSEVLAWLKEHKMEKTKQFELLDISWLIESMKVGKPVDTKGKYQLAESVEVSANPDPTEGRVNELPPTMKTVSPYACQRRTTLNNRNQRFTDSLEILRENYVFKGNDDTALEFRRAISVLKSLPFEVRSLKDTEGLPWISDEVKGIMEEIIEVGESREVQAVLNDEWYQSFHAFTRVFGVGVGTADKWYQMGLRTLEDVRSSKTLKLTTWAKVGLTYYEDLARGVTRAEADAIWLLVQDAVATFDPDAIVEIVGGQRRGKPQSHDVDLLISSPGAEKEQEDQLLQKVMNLWHKQGLLLCGKVVWSQWEWGGLPSGKADEGDGEASCFLILKLYDHLVRKSKHNMPTGSNMGESKPWKAIKVDLLRCPRGSFAFAMLQWTGSRMFRRDLRDYAREEKNMMLDNHSLYDMTRGIQLPAKSEEEIFEHLGLEYLEPFYRNA

SEQ ID NO: 5281 - DNA, 1587 bp, synthetic construct
  misc_feature 1..1587: note = Variant of terminal deoxynucleotidyltransferase
  source 1..1587: mol_type = other DNA
atgcaccatcatcatcatcatggcggtagcggcagccacggcattcgtaccatcgattcggacttcgggaagaaacagcagaaaaaaggcgataaccacgatagttccgccacttatgaaatcaaatttcacgagtttgtgctgttcattctcgaagaaaaaatgggtgcgacgcgtcgtacttttctgacagatttagcccgcaagaaagggttccgcgtcgagaatgaactgaccgacgaagttacccacatcgtggcagaaaatctgtcacgctctgaagtattggcttggctgaaagaacacaagatggagaagaccaagcaattcgaactgctggatattagctggcttatcgaaagcatgaaagttggtaaaccggtggacaccaaggggaaataccagttggcggaatcggttgaggtgagtgcgaacccagatccgacagaaggtcgtgtaaacgagctgcctcctactatgaaaaccgtttctccgtatgcgtgtcaacgccgcaccaccctgaacaaccgtaatcaacgttttacggactcgctggagattcttcgcgagaattacgtgtttaaaggcaacgacgatgtggcgctggaatttcgtcgtgctatctccgtgctgaaaagccttccgtttgaggtacgtagcctgaaagacacggaaggattgccctggatcagtgatgaagtcaaagggattatggaagaaatcatcgaagtcggggagtcgcgtgaagtgcaggccgtgctcaatgatgagtggtatcaaagcttccacgcatttacgcgtgtctttggagtgggggtaggcacagcagacaagtggtaccagatgggtctgcgcaccctggaggatgttcgttccagcaagaccctgaagttgaccacgtgggcgaaagtaggtctgacgtattatgaagatcttgctcgcggcgttacccgtgcggaagctgacgcgatttggctgctggttcaggatgcagtcgcaactttcgacccggatgcgatcgtggagattgtcggtggacagcgtcgtgggaaacctcagtctcacgacgttgatctgcttatcagttctccgggagctgaaaaagagcaagaagaccaactcctgcagaaagtgatgaatctgtggaagaaacaagggttgttgctgtgtggtaaagtggtgtggagtcagtgggaatgggggggtctgccgtccggtaaggctgatgagggtgacggggaggcatcgtgctttctgatcctcaaactttatgatcatctggtgcgtaaaagtaaacataatatgccgactggttcgaacatgggcgagtccaaaccgtggaaagcaattaaagtagatctgctgcgttgcccccgcggcagttttgcgtttgcgatgttgcagtggaccggaagccgcatgttccgtcgcgatctgcgcgattacgcccgcgaagagaagaacatgatgctggacaatcatagcctgtatgacatgactcgtggtatccaactccctgctaaatcggaagaggaaattttcgaacatctggggcttgaatacctggaaccgttctatcgtaacgca

SEQ ID NO: 5282 - protein, 529 aa, synthetic construct
  REGION 1..529: note = Variant of terminal deoxynucleotidyltransferase
MHHHHHHGGSGSHGIRTIDSDFGKKQQKKGDNHDSSATYEIKFHEFVLFILEEKMGATRRTFLTDLARKKGFRVENELTDEVTHIVAENLSRSEVLAWLKEHKMEKTKQFELLDISWLIESMKVGKPVDTKGKYQLAESVEVSANPDPTEGRVNELPPTMKTVSPYACQRRTTLNNRNQRFTDSLEILRENYVFKGNDDVALEFRRAISVLKSLPFEVRSLKDTEGLPWISDEVKGIMEEIIEVGESREVQAVLNDEWYQSFHAFTRVFGVGVGTADKWYQMGLRTLEDVRSSKTLKLTTWAKVGLTYYEDLARGVTRAEADAIWLLVQDAVATFDPDAIVEIVGGQRRGKPQSHDVDLLISSPGAEKEQEDQLLQKVMNLWKKQGLLLCGKVVWSQWEWGGLPSGKADEGDGEASCFLILKLYDHLVRKSKHNMPTGSNMGESKPWKAIKVDLLRCPRGSFAFAMLQWTGSRMFRRDLRDYAREEKNMMLDNHSLYDMTRGIQLPAKSEEEIFEHLGLEYLEPFYRNA

SEQ ID NO: 5283 - DNA, 1587 bp, synthetic construct
  misc_feature 1..1587: note = Variant of terminal deoxynucleotidyltransferase
  source 1..1587: mol_type = other DNA
atgcaccatcatcatcatcatggcggtagcggcagccacggcattcgtaccatcgattcggacttcgggaagaaacagcagaaaaaaggcgataaccacgatagttccgccacttatgaaatcaaatttcacgagtttgtgctgttcattctcgaagaaaaaatgggtgcgacgcgtcgtacttttctgacagatttagcccgcaagaaagggttccgcgtcgagaatgaactgaccgacgaagttacccacatcgtggcagaaaatctgtcacgctctgaagtattggcttggctgaaagaacacaagatggagaagaccaagcaattcgaactgctggatattagctggcttatcgaaagcatgaaagttggtaaaccggtggacaccaaggggaaataccagttggcggaatcggttgaggtgagtgcgaacccagatccgacagaaggtcgtgtaaacgagctgcctcctactatgaaaaccgtttctccgtatgcgtgtcaacgccgcaccaccctgaacaaccgtaatcaacgttttacggactcgctggagattcttcgcgagaattacgtgtttaaaggcaacgacgatactgcgctggaatttcgtcgtgctatctccgtgctgaaaagccttccgtttgaggtacgtagcctgaaagacacggaaggattgccctggatcagtgatgaagtcaaagggattatggaagaaatcatcgaagtcggggagtcgcgtgaagtgcaggccgtgctcaatgatgagtggtatcaaagcttccacgcatttacgcgtgtctttggagtgggggtaggcacagcagacaagtggtaccagatgggtctgcgcaccctggaggatgttcgttccagcaagaccctgaagttgaccacgtgggcgaaagtaggtctgacgtattatgaagatcttgctcgcggcgttacccgtgcggaagctgacgcgatttggactctggttcaggatgcagtcgcaactttcgacccggatgcgatcgtggagattgtcggtggacagcgtcgtgggaaacctcagtctcacgacgttgatctgcttatcagttctccgggagctgaaaaagagcaagaagaccaactcctgcagaaagtgatgaatctgtggaagaaacaagggttgttgctgtgtggtaaagtggtgtggagtcagtgggaatgggggggtctgccgtccggtaaggctgatgagggtgacggggaggcatcgtgctttctgatcctcaaactttatgatcatctggtgcgtaaaagtaaacataatatgccgactggttcgaacatgggcgagtccaaaccgtggaaagcaattaaagtagatctgctgcgttgcccccgcggcagttttgcgtttgcgatgttgcagtggaccggaagccgcatgttccgtcgcgatctgcgcgattacgcccgcgaagagaagaacatgatgctggacaatcatagcctgtatgacatgactcgtggtatccaactccctgctaaatcggaagaggaaattttcgaacatctggggcttgaatacctggaaccgttctatcgtaacgca

SEQ ID NO: 5284 - protein, 529 aa, synthetic construct
  REGION 1..529: note = Variant of terminal deoxynucleotidyltransferase
MHHHHHHGGSGSHGIRTIDSDFGKKQQKKGDNHDSSATYEIKFHEFVLFILEEKMGATRRTFLTDLARKKGFRVENELTDEVTHIVAENLSRSEVLAWLKEHKMEKTKQFELLDISWLIESMKVGKPVDTKGKYQLAESVEVSANPDPTEGRVNELPPTMKTVSPYACQRRTTLNNRNQRFTDSLEILRENYVFKGNDDTALEFRRAISVLKSLPFEVRSLKDTEGLPWISDEVKGIMEEIIEVGESREVQAVLNDEWYQSFHAFTRVFGVGVGTADKWYQMGLRTLEDVRSSKTLKLTTWAKVGLTYYEDLARGVTRAEADAIWTLVQDAVATFDPDAIVEIVGGQRRGKPQSHDVDLLISSPGAEKEQEDQLLQKVMNLWKKQGLLLCGKVVWSQWEWGGLPSGKADEGDGEASCFLILKLYDHLVRKSKHNMPTGSNMGESKPWKAIKVDLLRCPRGSFAFAMLQWTGSRMFRRDLRDYAREEKNMMLDNHSLYDMTRGIQLPAKSEEEIFEHLGLEYLEPFYRNA

SEQ ID NO: 5285 - DNA, 1587 bp, synthetic construct
  misc_feature 1..1587: note = Variant of terminal deoxynucleotidyltransferase
  source 1..1587: mol_type = other DNA
atgcaccatcatcatcatcatggcggtagcggcagccacggcattcgtaccatcgattcggacttcgggaagaaacagcagaaaaaaggcgataaccacgatagttccgccacttatgaaatcaaatttcacgagtttgtgctgttcattctcgaagaaaaaatgggtgcgacgcgtcgtacttttctgacagatttagcccgcaagaaagggttccgcgtcgagaatgaactgaccgacgaagttacccacatcgtggcagaaaatctgtcacgctctgaagtattggcttggctgaaagaacacaagatggagaagaccaagcaattcgaactgctggatattagctggcttatcgaaagcatgaaagttggtaaaccggtggacaccaaggggaaataccagttggcggaatcggttgaggtgagtgcgaacccagatccgacagaaggtcgtgtaaacgagctgcctcctactatgaaaaccgtttctccgtatgcgtgtcaacgccgcaccaccctgaacaaccgtaatcaacgttttacggactcgctggagattcttcgcgagaattacgtgtttaaaggcaacgacgatactgcgctggaatttcgtcgtgctatctccgtgctgaaaagccttccgtttgaggtacgtagcctgaaagacacggaaggattgccctggatcagtgatgaagtcaaagggattatggaagaaatcatcgaagtcggggagtcgcgtgaagtgcaggccgtgctcaatgatgagtggtatcaaagcttccacgcatttacgcgtgtctttggagtgggggtaggcacagcagacaagtggtaccagatgggtctgcgcaccctggaggatgttcgttccagcaagaccctgaagttgaccacgtgggcgaaagtaggtctgacgtattatgaagatcttgctcgcggcgttacccgtgcggaagctgacgcgatttggctgctggttcaggatgcagtcgcaactttcgacccggatgcgatcgtggagattgtcggtggacagcgtcgtgggaaacctcagtctcacgacgttgatctgcttatcagttctccgggagctgaaaaagagcaagaagaccaactcctgcagaaagtgatgaatctgtggaagaaacaagggttgttgctgtgtggtaaagtggtgtggagtcagtgggaatgggggggtctgccgtccggtaaggctgatgagggtgacggggaggcatcgtgctttctgatcctcaaactttatgatcatctggtgcgtaaaagtaaacataatatgccgactggttcgaacatgggcgagtccaaaccgtggaaagcaattaaagtagatctgctgcgttgcccccgcggcagttttgcgtttgcgatgttgcagtggaccggaagccgcatgttccgtcgcgatctgcgcgattacgcccgcgaagagaagaacatgatgctggacaatcatagcctgtatgacatgactcgtggtatccaactccctgctgcttcggaagaggaaattttcgaacatctggggcttgaatacctggaaccgttctatcgtaacgca

SEQ ID NO: 5286 - protein, 529 aa, synthetic construct
  REGION 1..529: note = Variant of terminal deoxynucleotidyltransferase
MHHHHHHGGSGSHGIRTIDSDFGKKQQKKGDNHDSSATYEIKFHEFVLFILEEKMGATRRTFLTDLARKKGFRVENELTDEVTHIVAENLSRSEVLAWLKEHKMEKTKQFELLDISWLIESMKVGKPVDTKGKYQLAESVEVSANPDPTEGRVNELPPTMKTVSPYACQRRTTLNNRNQRFTDSLEILRENYVFKGNDDTALEFRRAISVLKSLPFEVRSLKDTEGLPWISDEVKGIMEEIIEVGESREVQAVLNDEWYQSFHAFTRVFGVGVGTADKWYQMGLRTLEDVRSSKTLKLTTWAKVGLTYYEDLARGVTRAEADAIWLLVQDAVATFDPDAIVEIVGGQRRGKPQSHDVDLLISSPGAEKEQEDQLLQKVMNLWKKQGLLLCGKVVWSQWEWGGLPSGKADEGDGEASCFLILKLYDHLVRKSKHNMPTGSNMGESKPWKAIKVDLLRCPRGSFAFAMLQWTGSRMFRRDLRDYAREEKNMMLDNHSLYDMTRGIQLPAASEEEIFEHLGLEYLEPFYRNA

SEQ ID NO: 5287 - DNA, 1587 bp, synthetic construct
  misc_feature 1..1587: note = Variant of terminal deoxynucleotidyltransferase
  source 1..1587: mol_type = other DNA
atgcaccatcatcatcatcatggcggtagcggcagccacggcattcgtaccatcgattcggacttcgggaagaaacagcagaaaaaaggcgataaccacgatagttccgccacttatgaaatcaaatttcacgagtttgtgctgttcattctcgaagaaaaaatgggtgcgacgcgtcgtacttttctgacagatttagcccgcaagaaagggttccgcgtcgagaatgaactgaccgacgaagttacccacatcgtggcagaaaatctgtcacgctctgaagtattggcttggctgaaagaacacaagatggagaagaccaagcaattcgaactgctggatattagctggcttatcgaaagcatgaaagttggtaaaccggtggacaccaaggggaaataccagttggcggaatcggttgaggtgagtgcgaacccagatccgacagaaggtcgtgtaaacgagctgcctcctactatgaaaaccgtttctccgtatgcgtgtcaacgccgcaccaccctgaacaaccgtaatcaacgttttacggactcgctggagattcttcgcgagaattacgtgtttaaaggcaacgacgatactgcgctggaatttcgtcgtgctatctccgtgctgaaaagccttccgtttgaggtacgtagcctgaaagacacggaaggattgccctggatcagtgatgaagtcaaagggattatggaagaaatcatcgaagtcggggagtcgcgtgaagtgcaggccgtgctcaatgatgagtggtatcaaagcttccacgcatttacgcgtgtctttggagtgggggtaggcacagcagacaagtggtaccagatgggtctgcgcaccctggaggatgttcgttccagcaagaccctgaagttgaccacgtgggcgaaagtaggtctgacgtattatgaagatcttgctcgcggcgttacccgtgcggaagctgacgcgatttggctgctggttcaggatgcagtcgcaactttcgacccggatgcgatcgtggagattgtcggtggacagcgtcgtgggaaacctcagtctcacgacgttgatctgcttatcagttctccgggagctgaaaaagagcaagaagaccaactcctgcagaaagtgatgaatctgtggaagaaacaagggttgttgctgtgtggtaaagtgcagtggagtcagtgggaatgggggggtctgccgtccggtaaggctgatgagggtgacggggaggcatcgtgctttctgatcctcaaactttatgatcatctggtgcgtaaaagtaaacataatatgccgactggttcgaacatgggcgagtccaaaccgtggaaagcaattaaagtagatctgctgcgttgcccccgcggcagttttgcgtttgcgatgttgcagtggaccggaagccgcatgttccgtcgcgatctgcgcgattacgcccgcgaagagaagaacatgatgctggacaatcatagcctgtatgacatgactcgtggtatccaactccctgctaaatcggaagaggaaattttcgaacatctggggcttgaatacctggaaccgttctatcgtaacgca

SEQ ID NO: 5288 - protein, 529 aa, synthetic construct
  REGION 1..529: note = Variant of terminal deoxynucleotidyltransferase
MHHHHHHGGSGSHGIRTIDSDFGKKQQKKGDNHDSSATYEIKFHEFVLFILEEKMGATRRTFLTDLARKKGFRVENELTDEVTHIVAENLSRSEVLAWLKEHKMEKTKQFELLDISWLIESMKVGKPVDTKGKYQLAESVEVSANPDPTEGRVNELPPTMKTVSPYACQRRTTLNNRNQRFTDSLEILRENYVFKGNDDTALEFRRAISVLKSLPFEVRSLKDTEGLPWISDEVKGIMEEIIEVGESREVQAVLNDEWYQSFHAFTRVFGVGVGTADKWYQMGLRTLEDVRSSKTLKLTTWAKVGLTYYEDLARGVTRAEADAIWLLVQDAVATFDPDAIVEIVGGQRRGKPQSHDVDLLISSPGAEKEQEDQLLQKVMNLWKKQGLLLCGKVQWSQWEWGGLPSGKADEGDGEASCFLILKLYDHLVRKSKHNMPTGSNMGESKPWKAIKVDLLRCPRGSFAFAMLQWTGSRMFRRDLRDYAREEKNMMLDNHSLYDMTRGIQLPAKSEEEIFEHLGLEYLEPFYRNA

SEQ ID NO: 5289 - DNA, 1587 bp, synthetic construct
  misc_feature 1..1587: note = Variant of terminal deoxynucleotidyltransferase
  source 1..1587: mol_type = other DNA
atgcaccatcatcatcatcatggcggtagcggcagccacggcattcgtaccatcgattcggacttcgggaagaaacagcagaaaaaaggcgataaccacgatagttccgccacttatgaaatcaaatttcacgagtttgtgctgttcattctcgaagaaaaaatgggtgcgacgcgtcgtacttttctgacagatttagcccgcaagaaagggttccgcgtcgagaatgaactgaccgacgaagttacccacatcgtggcagaaaatctgtcacgctctgaagtattggcttggctgaaagaacacaagatggagaagaccaagcaattcgaactgctggatattagctggcttatcgaaagcatgaaagttggtaaaccggtggacaccaaggggaaataccagttggcggaatcggttgaggtgagtgcgaacccagatccgacagaaggtcgtgtaaacgagctgcctcctactatgaaaaccgtttctccgtatgcgtgtcaacgccgcaccaccctgaacaaccgtaatcaacgttttacggactcgctggagattcttcgcgagaattacgtgtttaaaggcaacgacgatactgcgctggaatttcgtcgtgctatctccgtgctgaaaagccttccgtttgaggtacgtagcctgaaagacacggaaggattgccctggatcagtgatgaagtcaaagggattatggaagaaatcatcgaagtcggggagtcgcgtgaagtgcaggccgtgctcaatgatgagtggtatcaaagcttccacgcatttacgcgtgtctttggagtgggggtaggcacagcagacaagtggtaccagatgggtctgcgcaccctggaggatgttcgttccagcaagaccctgaagttgaccacgtgggcgaaagtaggtctgacgtattatgaagatcttgctcgcggcgttacccgtgcggaagctgacgcgatttggctgctggttaaggatgcagtcgcaactttcgacccggatgcgatcgtggagattgtcggtggacagcgtcgtgggaaacctcagtctcacgacgttgatctgcttatcagttctccgggagctgaaaaagagcaagaagaccaactcctgcagaaagtgatgaatctgtggaagaaacaagggttgttgctgtgtggtaaagtggtgtggagtcagtgggaatgggggggtctgccgtccggtaaggctgatgagggtgacggggaggcatcgtgctttctgatcctcaaactttatgatcatctggtgcgtaaaagtaaacataatatgccgactggttcgaacatgggcgagtccaaaccgtggaaagcaattaaagtagatctgctgcgttgcccccgcggcagttttgcgtttgcgatgttgcagtggaccggaagccgcatgttccgtcgcgatctgcgcgattacgcccgcgaagagaagaacatgatgctggacaatcatagcctgtatgacatgactcgtggtatccaactccctgctaaatcggaagaggaaattttcgaacatctggggcttgaatacctggaaccgttctatcgtaacgca

SEQ ID NO: 5290 - protein, 529 aa, synthetic construct
  REGION 1..529: note = Variant of terminal deoxynucleotidyltransferase
MHHHHHHGGSGSHGIRTIDSDFGKKQQKKGDNHDSSATYEIKFHEFVLFILEEKMGATRRTFLTDLARKKGFRVENELTDEVTHIVAENLSRSEVLAWLKEHKMEKTKQFELLDISWLIESMKVGKPVDTKGKYQLAESVEVSANPDPTEGRVNELPPTMKTVSPYACQRRTTLNNRNQRFTDSLEILRENYVFKGNDDTALEFRRAISVLKSLPFEVRSLKDTEGLPWISDEVKGIMEEIIEVGESREVQAVLNDEWYQSFHAFTRVFGVGVGTADKWYQMGLRTLEDVRSSKTLKLTTWAKVGLTYYEDLARGVTRAEADAIWLLVKDAVATFDPDAIVEIVGGQRRGKPQSHDVDLLISSPGAEKEQEDQLLQKVMNLWKKQGLLLCGKVVWSQWEWGGLPSGKADEGDGEASCFLILKLYDHLVRKSKHNMPTGSNMGESKPWKAIKVDLLRCPRGSFAFAMLQWTGSRMFRRDLRDYAREEKNMMLDNHSLYDMTRGIQLPAKSEEEIFEHLGLEYLEPFYRNA

SEQ ID NO: 5291 - DNA, 1587 bp, synthetic construct
  misc_feature 1..1587: note = Variant of terminal deoxynucleotidyltransferase
  source 1..1587: mol_type = other DNA
atgcaccatcatcatcatcatggcggtagcggcagccacggcattcgtaccatcgattcggacttcgggaagaaacagcagaaaaaaggcgataaccacgatagttccgccacttatgaaatcaaatttcacgagtttgtgctgttcattctcgaagaaaaaatgggtgcgacgcgtcgtacttttctgacagatttagcccgcaagaaagggttccgcgtcgagaatgaactgaccgacgaagttacccacatcgtggcagaaaatctgtcacgctctgaagtatcggcttggctgaaagaacacaagatggagaagaccaagcaattcgaactgctggatattagctggcttatcgaaagcatgaaagttggtaaaccggtggacaccaaggggaaataccagttggcggaatcggttgaggtgagtgcgaacccagatccgacagaaggtcgtgtaaacgagctgcctcctactatgaaaaccgtttctccgtatgcgtgtcaacgccgcaccaccctgaacaaccgtaatcaacgttttacggactcgctggagattcttcgcgagaattacgtgtttaaaggcaacgacgatactgcgctggaatttcgtcgtgctatctccgtgctgaaaagccttccgtttgaggtacgtagcctgaaagacacggaaggattgccctggatcagtgatgaagtcaaagggattatggaagaaatcatcgaagtcggggagtcgcgtgaagtgcaggccgtgctcaatgatgagtggtatcaaagcttccacgcatttacgcgtgtctttggagtgggggtaggcacagcagacaagtggtaccagatgggtctgcgcaccctggaggatgttcgttccagcaagaatctgaagttgaccacgtgggcgaaagtaggtctgacgtattatgaagatcttgctcgcggcgttacccgtgcggaagctgacgcgatttggctgctggttcaggatgcagtcgcaactttcgacccggatgcgatcgtggagattgtcggtggacagcgtcgtgggaaacctcagtctcacgacgttgatctgcttatcagttctccgggagctgaaaaagagcaagaagaccaactcctgcagaaagtgatgaatctgtggaagaaacaagggttgttgctgtgtggtaaagtggtgtggagtcagtgggaatgggggggtctgccgtccggtaaggctgatgagggtgacggggaggcatcgtgctttctgatcctcaaactttatgatcatctggtgcgtaaaagtaaacataatatgccgactggttcgaacatgggcgagtccaaaccgtggaaagcaattaaagtagatctgctgcgttgcccccgcggcagttttgcgtttgcgatgttgcagtggaccggaagccgcatgttccgtcgcgatctgcgcgattacgcccgcgaagagaagaacatgatgctggacaatcatagcctgtatgacatgactcgtggtatccaactccctgctaaatcggaagaggaaattttcgaacatctggggcttgaatacctggaaccgttctatcgtaacgca

SEQ ID NO: 5292 - protein, 529 aa, synthetic construct
  REGION 1..529: note = Variant of terminal deoxynucleotidyltransferase
MHHHHHHGGSGSHGIRTIDSDFGKKQQKKGDNHDSSATYEIKFHEFVLFILEEKMGATRRTFLTDLARKKGFRVENELTDEVTHIVAENLSRSEVSAWLKEHKMEKTKQFELLDISWLIESMKVGKPVDTKGKYQLAESVEVSANPDPTEGRVNELPPTMKTVSPYACQRRTTLNNRNQRFTDSLEILRENYVFKGNDDTALEFRRAISVLKSLPFEVRSLKDTEGLPWISDEVKGIMEEIIEVGESREVQAVLNDEWYQSFHAFTRVFGVGVGTADKWYQMGLRTLEDVRSSKNLKLTTWAKVGLTYYEDLARGVTRAEADAIWLLVQDAVATFDPDAIVEIVGGQRRGKPQSHDVDLLISSPGAEKEQEDQLLQKVMNLWKKQGLLLCGKVVWSQWEWGGLPSGKADEGDGEASCFLILKLYDHLVRKSKHNMPTGSNMGESKPWKAIKVDLLRCPRGSFAFAMLQWTGSRMFRRDLRDYAREEKNMMLDNHSLYDMTRGIQLPAKSEEEIFEHLGLEYLEPFYRNA

SEQ ID NO: 5293 - DNA, 1587 bp, synthetic construct
  misc_feature 1..1587: note = Variant of terminal deoxynucleotidyltransferase
  source 1..1587: mol_type = other DNA
atgcaccatcatcatcatcatggcggtagcggcagccacggcattcgtaccatcgattcggacttcgggaagaaacagcagaaaaaaggcgataaccacgatagttccgccacttatgaaatcaaatttcacgagtttgtgctgttcattctcgaagaaaaaatgggtgcgacgcgtcgtacttttctgacagatttagcccgcaagaaagggttccgcgtcgagaatgaactgaccgacgaagttacccacatcgtggcagaaaatctgtcacgctctgaagtattggcttggctgaaagaacacaagatggagaagaccaagcaattcgaactgctggatattagctggcttatcgaaagcatgaaagttggtaaaccggtggacaccaaggggaaataccagttggcggaatcggttgaggtgagtgcgaacccagatccgacagaaggtcgtgtaaacgagctgcctcctactatgaaaaccgtttctccgtatgcgtgtcaacgccgcaccaccctgaacaaccgtaatcaacgttttacggactcgctggagattcttcgcgagaattacgtgtttaaaggcaacgacgatactgcgctggaatttcgtcgtgctatctccgtgctgaaaagccttccgtttgaggtacgtagcctgaaagacacggaaggattgccctggatcagtgatgaagtcaaagggattatggaagaaatcatcgaagtcggggagtcgcgtgaagtgcaggccgtgctcaatgatgagtggtatcaaagcttccacgcatttacgcgtgtctttggagtgggggtaggcacagcagacaagtggtaccagatgggtctgcgcaccctggaggatgttcgttccagcaagaccctgaagttgaccacgtgggcgaaagtaggtctgacgtattatgaagatcttgctcgcggcgttacccgtgcggaagctgacgcgatttggctgctggttcaggatgcagtcgcaactttcgacccggatgcgatcgtggagattgtcggtggacagcgtcgtgggaaacctcagtctcacgacgttgatctgcttatcagttctccgggagctgaaaaagagcaagaagaccaactcctgcagaaagtgatgaatctgtggaagaaacaagggttgttgctgtgtggtaaagtgctttggagtcagtgggaatgggggggtctgccgtccggtaaggctgatgagggtgacggggaggcatcgtgctttctgatcctcaaactttatgatcatctggtgcgtaaaagtaaacataatatgccgactggttcgaacatgggcgagtccaaaccgtggaaagcaattaaagtagatctgctgcgttgcccccgcggcagttttgcgtttgcgatgttgcagtggaccggaagccgcatgttccgtcgcgatctgcgcgattacgcccgcgaagagaagaacatgatgctggacaatcatagcctgtatgacatgactcgtggtatccaactccctgctaaatcggaagaggaaattttcgaacatctggggcttgaatacctggaaccgttctatcgtaacgca

SEQ ID NO: 5294 - protein, 529 aa, synthetic construct
  REGION 1..529: note = Variant of terminal deoxynucleotidyltransferase
MHHHHHHGGSGSHGIRTIDSDFGKKQQKKGDNHDSSATYEIKFHEFVLFILEEKMGATRRTFLTDLARKKGFRVENELTDEVTHIVAENLSRSEVLAWLKEHKMEKTKQFELLDISWLIESMKVGKPVDTKGKYQLAESVEVSANPDPTEGRVNELPPTMKTVSPYACQRRTTLNNRNQRFTDSLEILRENYVFKGNDDTALEFRRAISVLKSLPFEVRSLKDTEGLPWISDEVKGIMEEIIEVGESREVQAVLNDEWYQSFHAFTRVFGVGVGTADKWYQMGLRTLEDVRSSKTLKLTTWAKVGLTYYEDLARGVTRAEADAIWLLVQDAVATFDPDAIVEIVGGQRRGKPQSHDVDLLISSPGAEKEQEDQLLQKVMNLWKKQGLLLCGKVLWSQWEWGGLPSGKADEGDGEASCFLILKLYDHLVRKSKHNMPTGSNMGESKPWKAIKVDLLRCPRGSFAFAMLQWTGSRMFRRDLRDYAREEKNMMLDNHSLYDMTRGIQLPAKSEEEIFEHLGLEYLEPFYRNA

SEQ ID NO: 5295 - DNA, 1587 bp, synthetic construct
  misc_feature 1..1587: note = Variant of terminal deoxynucleotidyltransferase
  source 1..1587: mol_type = other DNA
atgcaccatcatcatcatcatggcggtagcggcagccacggcattcgtaccatcgattcggacttcgggaagaaacagcagaaaaaaggcgataaccacgatagttccgccacttatgaaatcaaatttcacgagtttgtgctgttcattctcgaagaaaaaatgggtgcgacgcgtcgtacttttctgacagatttagcccgcaagaaagggttccgcgtcgagaatgaactgaccgacgaagttacccacatcgtggcagaaaatctgtcacgctctgaagtattggcttggctgaaagaacacaagatggagaagaccaagcaattcgaactgctggatattagctggcttatcgaaagcatgaaagttggtaaaccggtggacaccaaggggaaataccagttggcggaatcggttgaggtgagtgcgaacccagatccgacagaaggtcgtgtaaacgagctgcctcctactatgaaaaccgtttctccgtatgcgtgtcaacgccgcaccaccctgaacaaccgtaatcaacgttttacggactcgctggagattcttcgcgagaattacgtgtttaaaggcaacgacgatactgcgctggaatttcgtcgtgctatctccgtgctgaaaagccttccgtttgaggtacgtagcctgaaagacacggaaggattgccctggatcagtgatgaagtcaaagggattatggaagaaatcatcgaagtcggggagtcgcgtgaagtgcaggccgtgctcaatgatgagtggtatcaaagcttccacgcatttacgcgtgtctttggagtgggggtaggcacagcagacaagtggtaccagatgggtctgcgcaccctggaggatgttcgttccagcaagaagctgaagttgaccacgtgggcgaaagtaggtctgacgtattatgaagatcttgctcgcggcgttacccgtgcggaagctgacgcgatttggctgctggttcaggatgcagtcgcaactttcgacccggatgcgatcgtggagattgtcggtggacagcgtcgtgggaaacctcagtctcacgacgttgatctgcttatcagttctccgggagctgaaaaagagcaagaagaccaactcctgcagaaagtgatgaatctgtggaagaaacaagggttgttgctgtgtggtaaagtggtgtggagtcagtgggaatgggggggtctgccgtccggtaaggctgatgagggtgacggggaggcatcgtgctttctgatcctcaaactttatgatcatctggtgcgtaaaagtaaacataatatgccgactggttcgaacatgggcgagtccaaaccgtggaaagcaattaaagtagatctgctgcgttgcccccgcggcagttttgcgtttgcgatgttgcagtggaccggaagccgcatgttccgtcgcgatctgcgcgattacgcccgcgaagagaagaacatgatgctggacaatcatagcctgtatgacatgactcgtggtatccaactccctgctaaatcggaagaggaaattttcgaacatctggggcttgaatacctggaaccgttctatcgtaacgca

SEQ ID NO: 5296 - protein, 529 aa, synthetic construct
  REGION 1..529: note = Variant of terminal deoxynucleotidyltransferase
MHHHHHHGGSGSHGIRTIDSDFGKKQQKKGDNHDSSATYEIKFHEFVLFILEEKMGATRRTFLTDLARKKGFRVENELTDEVTHIVAENLSRSEVLAWLKEHKMEKTKQFELLDISWLIESMKVGKPVDTKGKYQLAESVEVSANPDPTEGRVNELPPTMKTVSPYACQRRTTLNNRNQRFTDSLEILRENYVFKGNDDTALEFRRAISVLKSLPFEVRSLKDTEGLPWISDEVKGIMEEIIEVGESREVQAVLNDEWYQSFHAFTRVFGVGVGTADKWYQMGLRTLEDVRSSKKLKLTTWAKVGLTYYEDLARGVTRAEADAIWLLVQDAVATFDPDAIVEIVGGQRRGKPQSHDVDLLISSPGAEKEQEDQLLQKVMNLWKKQGLLLCGKVVWSQWEWGGLPSGKADEGDGEASCFLILKLYDHLVRKSKHNMPTGSNMGESKPWKAIKVDLLRCPRGSFAFAMLQWTGSRMFRRDLRDYAREEKNMMLDNHSLYDMTRGIQLPAKSEEEIFEHLGLEYLEPFYRNA

SEQ ID NO: 5297 - DNA, 1587 bp, synthetic construct
  misc_feature 1..1587: note = Variant of terminal deoxynucleotidyltransferase
  source 1..1587: mol_type = other DNA
atgcaccatcatcatcatcatggcggtagcggcagccacggcattcgtaccatcgattcggacttcgggaagaaacagcagaaaaaaggcgataaccacgatagttccgccacttatgaaatcaaatttcacgagtttgtgctgttcattctcgaagaaaaaatgggtgcgacgcgtcgtacttttctgacagatttagcccgcaagaaagggttccgcgtcgagaatgaactgaccgacgaagttacccacatcgtggcagaaaatctgtcacgctctgaagtattggcttggctgaaagaacacaagatggagaagaccaagcaattcgaactgctggatattagctggcttatcgaaagcatgaaagttggtaaaccggtggacaccaaggggaaataccagttggcggaatcggttgaggtgagtgcgaacccagatccgacagaaggtcgtgtaaacgagctgcctcctactatgaaaaccgtttctccgtatgcgtgtcaacgccgcaccaccctgaacaaccgtaatcaacgttttacggactcgctggagattcttcgcgagaattacgtgtttaaaggcaacgaccggactgcgctggaatttcgtcgtgctatctccgtgctgaaaagccttccgtttgaggtacgtagcctgaaagacacggaaggattgccctggatcagtgatgaagtcaaagggattatggaagaaatcatcgaagtcggggagtcgcgtgaagtgcaggccgtgctcaatgatgagtggtatcaaagcttccacgcatttacgcgtgtctttggagtgggggtaggcacagcagacaagtggtaccagatgggtctgcgcaccctggaggatgttcgttccagcaagaccctgaagttgaccacgtgggcgaaagtaggtctgacgtattatgaagatcttgctcgcggcgttacccgtgcggaagctgacgcgatttggctgctggttcaggatgcagtcgcaactttcgacccggatgcgatcgtggagattgtcggtggacagcgtcgtgggaaacctcagtctcacgacgttgatctgcttatcagttctccgggagctgaaaaagagcaagaagaccaactcctgcagaaagtgatgaatctgtggaagaaacaagggttgttgctgtgtggtaaagtggtgtggagtcagtgggaatgggggggtctgccgtccggtaaggctgatgagggtgacggggaggcatcgtgctttctgatcctcaaactttatgatcatctggtgcgtaaaagtaaacataatatgccgactggttcgaacatgggcgagtccaaaccgtggaaagcaattaaagtagatctgctgcgttgcccccgcggcagttttgcgtttgcgatgttgcagtggaccggaagccgcatgttccgtcgcgatctgcgcgattacgcccgcgaagagaagaacatgatgctggacaatcatagcctgtatgacatgactcgtggtatccaactccctgctaaatcggaagaggaaattttcgaacatctggggcttgaatacctggaaccgttctatcgtaacgca

SEQ ID NO: 5298 - protein, 529 aa, synthetic construct
  REGION 1..529: note = Variant of terminal deoxynucleotidyltransferase
MHHHHHHGGSGSHGIRTIDSDFGKKQQKKGDNHDSSATYEIKFHEFVLFILEEKMGATRRTFLTDLARKKGFRVENELTDEVTHIVAENLSRSEVLAWLKEHKMEKTKQFELLDISWLIESMKVGKPVDTKGKYQLAESVEVSANPDPTEGRVNELPPTMKTVSPYACQRRTTLNNRNQRFTDSLEILRENYVFKGNDRTALEFRRAISVLKSLPFEVRSLKDTEGLPWISDEVKGIMEEIIEVGESREVQAVLNDEWYQSFHAFTRVFGVGVGTADKWYQMGLRTLEDVRSSKTLKLTTWAKVGLTYYEDLARGVTRAEADAIWLLVQDAVATFDPDAIVEIVGGQRRGKPQSHDVDLLISSPGAEKEQEDQLLQKVMNLWKKQGLLLCGKVVWSQWEWGGLPSGKADEGDGEASCFLILKLYDHLVRKSKHNMPTGSNMGESKPWKAIKVDLLRCPRGSFAFAMLQWTGSRMFRRDLRDYAREEKNMMLDNHSLYDMTRGIQLPAKSEEEIFEHLGLEYLEPFYRNA

SEQ ID NO: 5299 - DNA, 1587 bp, synthetic construct
  misc_feature 1..1587: note = Variant of terminal deoxynucleotidyltransferase
  source 1..1587: mol_type = other DNA
atgcaccatcatcatcatcatggcggtagcggcagccacggcattcgtaccatcgattcggacttcgggaagaaacagcagaaaaaaggcgataaccacgatagttccgccacttatgaaatcaaatttcacgagtttgtgctgttcattctcgaagaaaaaatgggtgcgacgcgtcgtacttttctgacagatttagcccgcaagaaagggttccgcgtcgagaatgaactgaccgacgaagttacccacatcgtggcagaaaatctgtcacgctctgaagtattggcttggctgaaagaacacaagatggagaagaccaagcaattcgaactgctggatattagctggcttatcgaaagcatgaaagttggtaaaccggtggacaccaaggggaaataccagttggcggaatcggttgaggtgagtgcgaacccagatccgacagaaggtcgtgtaaacgagctgcctcctactatgaaaaccgtttctccgtatgcgtgtcaacgccgcaccaccctgaacaaccgtaatcaacgttttacggactcgctggagattcttcgcgagaattacgtgtttaaaggcaacgacgatactgcgctggaatttcgtcgtgctatctccgtgctgaaaagccttccgtttgaggtacgtagcctgaaagacacggaaggattgccctggatcagtgatgaagtcaaagggattatggaagaaatcatcgaagtcggggagtcgcgtgaagtgcaggccgtgctcaatgatgagtggtatcaaagcttccacgcatttacgcgtgtctttggagtgggggtaggcacagcagacaagtggtaccagatgggtctgcgcaccctggaggatgttcgttccagcaagaccctgaagttgaccacgtgggcgaaagtaggtctgacgtattatgaagatcttgctcgcggcgttacccgtgcggaagctgacgcgatttggctgctggttcaggatgcagtcgcaactttcgacccggatgcgatcgtggagattgtcggtggacagcgtcgtgggaaacctcagtctcacgacgttgatctgcttatcagttctccgggagctgaaaaagagcaagaagaccaactcctgcagaaagtgatgaatctgtggcgtaaacaagggttgttgctgtgtggtaaagtggtgtggagtcagtgggaatgggggggtctgccgtccggtaaggctgatgagggtgacggggaggcatcgtgctttctgatcctcaaactttatgatcatctggtgcgtaaaagtaaacataatatgccgactggttcgaacatgggcgagtccaaaccgtggaaagcaattaaagtagatctgctgcgttgcccccgcggcagttttgcgtttgcgatgttgcagtggaccggaagccgcatgttccgtcgcgatctgcgcgattacgcccgcgaagagaagaacatgatgctggacaatcatagcctgtatgacatgactcgtggtatccaactccctgctaaatcggaagaggaaattttcgaacatctggggcttgaatacctggaaccgttctatcgtaacgca

SEQ ID NO: 5300 - protein, 529 aa, synthetic construct
  REGION 1..529: note = Variant of terminal deoxynucleotidyltransferase
MHHHHHHGGSGSHGIRTIDSDFGKKQQKKGDNHDSSATYEIKFHEFVLFILEEKMGATRRTFLTDLARKKGFRVENELTDEVTHIVAENLSRSEVLAWLKEHKMEKTKQFELLDISWLIESMKVGKPVDTKGKYQLAESVEVSANPDPTEGRVNELPPTMKTVSPYACQRRTTLNNRNQRFTDSLEILRENYVFKGNDDTALEFRRAISVLKSLPFEVRSLKDTEGLPWISDEVKGIMEEIIEVGESREVQAVLNDEWYQSFHAFTRVFGVGVGTADKWYQMGLRTLEDVRSSKTLKLTTWAKVGLTYYEDLARGVTRAEADAIWLLVQDAVATFDPDAIVEIVGGQRRGKPQSHDVDLLISSPGAEKEQEDQLLQKVMNLWRKQGLLLCGKVVWSQWEWGGLPSGKADEGDGEASCFLILKLYDHLVRKSKHNMPTGSNMGESKPWKAIKVDLLRCPRGSFAFAMLQWTGSRMFRRDLRDYAREEKNMMLDNHSLYDMTRGIQLPAKSEEEIFEHLGLEYLEPFYRNA

SEQ ID NO: 5301 - DNA, 1587 bp, synthetic construct
  misc_feature 1..1587: note = Variant of terminal deoxynucleotidyltransferase
  source 1..1587: mol_type = other DNA
atgcaccatcatcatcatcatggcggtagcggcagccacggcattcgtaccatcgattcggacttcgggaagaaacagcagaaaaaaggcgataaccacgatagttccgccacttatgaaatcaaatttcacgagtttgtgctgttcattctcgaagaaaaaatgggtgcgacgcgtcgtacttttctgacagatttagcccgcaagaaagggttccgcgtcgagaatgaactgaccgacgaagttacccacatcgtggcagaaaatctgtcacgctctgaagtattggcttggctgaaagaacacaagatggagaagaccaagcaattcgaactgctggatattagctggcttatcgaaagcatgaaagttggtaaaccggtggacaccaaggggaaataccagttggcggaatcggttgaggtgagtgcgaacccagatccgacagaaggtcgtgtaaacgagctgcctcctactatgaaaaccgtttctccgtatgcgtgtcaacgccgcaccaccctgaacaaccgtaatcaacgttttacggactcgctggagattcttcgcgagaattacgtgtttaaaggcaacgacgatactgcgctggaatttcgtcgtgctatctccgtgctgaaaagccttccgtttgaggtacgtagcctgaaagacacggaaggattgccctggatcagtgatgaagtcaaagggattatggaagaaatcatcgaagtcggggagtcgcgtgaagtgcaggccgtgctcaatgatgagtggtatcaaagcttccacgcatttacgcgtgtctttggagtgggggtaggcacagcagacaagtggtaccagatgggtctgcgcaccctggaggatgttcgttccagcaagaccctgaagttgaccacgtgggcgaaagtaggtctgacgtattatgaagatcttgctcgcggcgttacccgtgcggaagctgacgcgatttggctgctggttcaggatgcagtcgcaactttcgacccggatgcgatcgtggagattgtcggtggacagcgtcgtgggaaacctcagtctcacgacgttgatctgcttatcagttctccgggagctgaaaaagagcaagaagaccaactcctgcagaaagtgatgaatctgtggaagaaacaagggttgttgctgtgtggtaaagtgcattggagtcagtgggaatgggggggtctgccgtccggtaaggctgatgagggtgacggggaggcatcgtgctttctgatcctcaaactttatgatcatctggtgcgtaaaagtaaacataatatgccgactggttcgaacatgggcgagtccaaaccgtggaaagcaattaaagtagatctgctgcgttgcccccgcggcagttttgcgtttgcgatgttgcagtggaccggaagccgcatgttccgtcgcgatctgcgcgattacgcccgcgaagagaagaacatgatgctggacaatcatagcctgtatgacatgactcgtggtatccaactccctgctaaatcggaagaggaaattttcgaacatctggggcttgaatacctggaaccgttctatcgtaacgca

SEQ ID NO: 5302 - protein, 529 aa, synthetic construct
  REGION 1..529: note = Variant of terminal deoxynucleotidyltransferase
MHHHHHHGGSGSHGIRTIDSDFGKKQQKKGDNHDSSATYEIKFHEFVLFILEEKMGATRRTFLTDLARKKGFRVENELTDEVTHIVAENLSRSEVLAWLKEHKMEKTKQFELLDISWLIESMKVGKPVDTKGKYQLAESVEVSANPDPTEGRVNELPPTMKTVSPYACQRRTTLNNRNQRFTDSLEILRENYVFKGNDDTALEFRRAISVLKSLPFEVRSLKDTEGLPWISDEVKGIMEEIIEVGESREVQAVLNDEWYQSFHAFTRVFGVGVGTADKWYQMGLRTLEDVRSSKTLKLTTWAKVGLTYYEDLARGVTRAEADAIWLLVQDAVATFDPDAIVEIVGGQRRGKPQSHDVDLLISSPGAEKEQEDQLLQKVMNLWKKQGLLLCGKVHWSQWEWGGLPSGKADEGDGEASCFLILKLYDHLVRKSKHNMPTGSNMGESKPWKAIKVDLLRCPRGSFAFAMLQWTGSRMFRRDLRDYAREEKNMMLDNHSLYDMTRGIQLPAKSEEEIFEHLGLEYLEPFYRNA

SEQ ID NO: 5303 - DNA, 1587 bp, synthetic construct
  misc_feature 1..1587: note = Variant of terminal deoxynucleotidyltransferase
  source 1..1587: mol_type = other DNA
atgcaccatcatcatcatcatggcggtagcggcagccacggcattcgtaccatcgattcggacttcgggaagaaacagcagaaaaaaggcgataaccacgatagttccgccacttatgaaatcaaatttcacgagtttgtgctgttcattctcgaagaaaaaatgggtgcgacgcgtcgtacttttctgacagatttagcccgcaagaaagggttccgcgtcgagaatgaactgaccgacgaagttacccacatcgtggcagaaaatctgtcacgctctgaagtattggcttggctgaaagaacacaagatggagaagaccaagcaattcgaactgctggatattagctggcttatcgaaagcatgaaagttggtaaaccggtggacaccaaggggaaataccagttggcggaatcggttgaggtgagtgcgaacccagatccgacagaaggtcgtgtaaacgagctgcctcctactatgaaaaccgtttctccgtatgcgtgtcaacgccgcaccaccctgaacaaccgtaatcaacgttttacggactcgctggagattcttcgcgagaattacgtgtttaaaggcaacgacgattatgcgctggaatttcgtcgtgctatctccgtgctgaaaagccttccgtttgaggtacgtagcctgaaagacacggaaggattgccctggatcagtgatgaagtcaaagggattatggaagaaatcatcgaagtcggggagtcgcgtgaagtgcaggccgtgctcaatgatgagtggtatcaaagcttccacgcatttacgcgtgtctttggagtgggggtaggcacagcagacaagtggtaccagatgggtctgcgcaccctggaggatgttcgttccagcaagaccctgaagttgaccacgtgggcgaaagtaggtctgacgtattatgaagatcttgctcgcggcgttacccgtgcggaagctgacgcgatttggctgctggttcaggatgcagtcgcaactttcgacccggatgcgatcgtggagattgtcggtggacagcgtcgtgggaaacctcagtctcacgacgttgatctgcttatcagttctccgggagctgaaaaagagcaagaagaccaactcctgcagaaagtgatgaatctgtggaagaaacaagggttgttgctgtgtggtaaagtggtgtggagtcagtgggaatgggggggtctgccgtccggtaaggctgatgagggtgacggggaggcatcgtgctttctgatcctcaaactttatgatcatctggtgcgtaaaagtaaacataatatgccgactggttcgaacatgggcgagtccaaaccgtggaaagcaattaaagtagatctgctgcgttgcccccgcggcagttttgcgtttgcgatgttgcagtggaccggaagccgcatgttccgtcgcgatctgcgcgattacgcccgcgaagagaagaacatgatgctggacaatcatagcctgtatgacatgactcgtggtatccaactccctgctaaatcggaagaggaaattttcgaacatctggggcttgaatacctggaaccgttctatcgtaacgca

SEQ ID NO: 5304 - protein, 529 aa, synthetic construct
  REGION 1..529: note = Variant of terminal deoxynucleotidyltransferase
MHHHHHHGGSGSHGIRTIDSDFGKKQQKKGDNHDSSATYEIKFHEFVLFILEEKMGATRRTFLTDLARKKGFRVENELTDEVTHIVAENLSRSEVLAWLKEHKMEKTKQFELLDISWLIESMKVGKPVDTKGKYQLAESVEVSANPDPTEGRVNELPPTMKTVSPYACQRRTTLNNRNQRFTDSLEILRENYVFKGNDDYALEFRRAISVLKSLPFEVRSLKDTEGLPWISDEVKGIMEEIIEVGESREVQAVLNDEWYQSFHAFTRVFGVGVGTADKWYQMGLRTLEDVRSSKTLKLTTWAKVGLTYYEDLARGVTRAEADAIWLLVQDAVATFDPDAIVEIVGGQRRGKPQSHDVDLLISSPGAEKEQEDQLLQKVMNLWKKQGLLLCGKVVWSQWEWGGLPSGKADEGDGEASCFLILKLYDHLVRKSKHNMPTGSNMGESKPWKAIKVDLLRCPRGSFAFAMLQWTGSRMFRRDLRDYAREEKNMMLDNHSLYDMTRGIQLPAKSEEEIFEHLGLEYLEPFYRNA

SEQ ID NO: 5305 - DNA, 1587 bp, synthetic construct
  misc_feature 1..1587: note = Variant of terminal deoxynucleotidyltransferase
  source 1..1587: mol_type = other DNA
atgcaccatcatcatcatcatggcggtagcggcagccacggcattcgtaccatcgattcggacttcgggaagaaacagcagaaaaaaggcgataaccacgatagttccgccacttatgaaatcaaatttcacgagtttgtgctgttcattctcgaagaaaaaatgggtgcgacgcgtcgtacttttctgacagatttagcccgcaagaaagggttccgcgtcgagaatgaactgaccgacgaagttacccacatcgtggcagaaaatctgtcacgctctgaagtattggcttggctgaaagaacacaagatggagaagaccaagcaattcgaactgctggatattagctggcttatcgaaagcatgaaagttggtaaaccggtggacaccaaggggaaataccagttggcggaatcggttgaggtgagtgcgaacccagatccgacagaaggtcgtgtaaacgagctgcctcctactatgaaaaccgtttctccgtatgcgtgtcaacgccgcaccaccctgaacaaccgtaatcaacgttttacggactcgctggagattcttcgcgagaattacgtgtttaaaggcaacgacgatactgcgctggaatttcgtcgtgctatctccgtgctgaaaagccttccgtttgaggtacgtagcctgaaagacacggaaggattgccctggatcagtgatgaagtcaaagggattatggaagaaatcatcgaagtcggggagtcgcgtgaagtgcaggccgtgctcaatgatgagtggtatcaaagcttccacgcatttacgcgtgtctttggagtgggggtaggcacagcagacaagtggtaccagatgggtctgcgcaccctggaggatgttcgttccagcaagaccctgaagttgaccacgtgggcgaaagtaggtctgacgtattatgaagatcttgctcgcggcgttacccgtgcggaagctgacgcgatttggctgctggttcaggatgcagtcgcaactttcgacccggatgcgatcgtggagattgtcggtggacagcgtcgtgggaaacctcagtctcacgacgttgatctgcttatcagttctccgggagctgaaaaagagcaagaagaccaactcctgcagaaagtgatgaatctgtggaagaaacaagggttgttgctgtgtggtaaagtggtgtggagtcagtgggaatgggggggtctgccgtccggtaaggctgatgagggtgacggggaggcatcgtgctttctgatcctcaaactttatgatcatctggtgcgtaaaagtaaacataatatgccgactggttcgaacatgggcgagtccaaaccgtggaaagcaattaaagtagatctgctgcgttgcccccgcggcagttttgcgtttgcgatgttgcagtggaccggaagccgcatgttccgtcgcgatctgcgcgattacgcccgcctggagaagaacatgatgctggacaatcatagcctgtatgacatgactcgtggtatccaactccctgctaaatcggaagaggaaattttcgaacatctggggcttgaatacctggaaccgttctatcgtaacgca

SEQ ID NO: 5306 - protein, 529 aa, synthetic construct
  REGION 1..529: note = Variant of terminal deoxynucleotidyltransferase
MHHHHHHGGSGSHGIRTIDSDFGKKQQKKGDNHDSSATYEIKFHEFVLFILEEKMGATRRTFLTDLARKKGFRVENELTDEVTHIVAENLSRSEVLAWLKEHKMEKTKQFELLDISWLIESMKVGKPVDTKGKYQLAESVEVSANPDPTEGRVNELPPTMKTVSPYACQRRTTLNNRNQRFTDSLEILRENYVFKGNDDTALEFRRAISVLKSLPFEVRSLKDTEGLPWISDEVKGIMEEIIEVGESREVQAVLNDEWYQSFHAFTRVFGVGVGTADKWYQMGLRTLEDVRSSKTLKLTTWAKVGLTYYEDLARGVTRAEADAIWLLVQDAVATFDPDAIVEIVGGQRRGKPQSHDVDLLISSPGAEKEQEDQLLQKVMNLWKKQGLLLCGKVVWSQWEWGGLPSGKADEGDGEASCFLILKLYDHLVRKSKHNMPTGSNMGESKPWKAIKVDLLRCPRGSFAFAMLQWTGSRMFRRDLRDYARLEKNMMLDNHSLYDMTRGIQLPAKSEEEIFEHLGLEYLEPFYRNA

SEQ ID NO: 5307 - DNA, 1587 bp, synthetic construct
  misc_feature 1..1587: note = Variant of terminal deoxynucleotidyltransferase
  source 1..1587: mol_type = other DNA
atgcaccatcatcatcatcatggcggtagcggcagccacggcattcgtaccatcgattcggacttcgggaagaaacagcagaaaaaaggcgataaccacgatagttccgccacttatgaaatcaaatttcacgagtttgtgctgttcattctcgaagaaaaaatgggtgcgacgcgtcgtacttttctgacagatttagcccgcaagaaagggttccgcgtcgagaatgaactgaccgacgaagttacccacatcgtggcagaaaatctgtcacgctctgaagtattggcttggctgaaagaacacaagatggagaagaccaagcaattcgaactgctggatattagctggcttatcgaaagcatgaaagttggtaaaccggtggacaccaaggggaaataccagttggcggaatcggttgaggtgagtgcgaacccagatccgacagaaggtcgtgtaaacgagctgcctcctactatgaaaaccgtttctccgtatgcgtgtcaacgccgcaccaccctgaacaaccgtaatcaacgttttacggactcgctggagattcttcgcgagaattacttttttaaaggcaacgacgatactgcgctggaatttcgtcgtgctatctccgtgctgaaaagccttccgtttgaggtacgtagcctgaaagacacggaaggattgccctggatcagtgatgaagtcaaagggattatggaagaaatcatcgaagtcggggagtcgcgtgaagtgcaggccgtgctcaatgatgagtggtatcaaagcttccacgcatttacgcgtgtctttggagtgggggtaggcacagcagacaagtggtaccagatgggtctgcgcaccctggaggatgttcgttccagcaagaccctgaagttgaccacgtgggcgaaagtaggtctgacgtattatgaagatcttgctcgcggcgttacccgtgcggaagctgacgcgatttggctgctggttcaggatgcagtcgcaactttcgacccggatgcgatcgtggagattgtcggtggacagcgtcgtgggaaacctcagtctcacgacgttgatctgcttatcagttctccgggagctgaaaaagagcaagaagaccaactcctgcagaaagtgatgaatctgtggaagaaacaagggttgttgctgtgtggtaaagtggtgtggagtcagtgggaatgggggggtctgccgtccggtaaggctgatgagggtgacggggaggcatcgtgctttctgatcctcaaactttatgatcatctggtgcgtaaaagtaaacataatatgccgactggttcgaacatgggcgagtccaaaccgtggaaagcaattaaagtagatctgctgcgttgcccccgcggcagttttgcgtttgcgatgttgcagtggaccggaagccgcatgttccgtcgcgatctgcgcgattacgcccgcgaagagaagaacatgatgctggacaatcatagcctgtatgacatgactcgtggtatccaactccctgctaaatcggaagaggaaattttcgaacatctggggcttgaatacctggaaccgttctatcgtaacgca

SEQ ID NO: 5308 - protein, 529 aa, synthetic construct
  REGION 1..529: note = Variant of terminal deoxynucleotidyltransferase
MHHHHHHGGSGSHGIRTIDSDFGKKQQKKGDNHDSSATYEIKFHEFVLFILEEKMGATRRTFLTDLARKKGFRVENELTDEVTHIVAENLSRSEVLAWLKEHKMEKTKQFELLDISWLIESMKVGKPVDTKGKYQLAESVEVSANPDPTEGRVNELPPTMKTVSPYACQRRTTLNNRNQRFTDSLEILRENYFFKGNDDTALEFRRAISVLKSLPFEVRSLKDTEGLPWISDEVKGIMEEIIEVGESREVQAVLNDEWYQSFHAFTRVFGVGVGTADKWYQMGLRTLEDVRSSKTLKLTTWAKVGLTYYEDLARGVTRAEADAIWLLVQDAVATFDPDAIVEIVGGQRRGKPQSHDVDLLISSPGAEKEQEDQLLQKVMNLWKKQGLLLCGKVVWSQWEWGGLPSGKADEGDGEASCFLILKLYDHLVRKSKHNMPTGSNMGESKPWKAIKVDLLRCPRGSFAFAMLQWTGSRMFRRDLRDYAREEKNMMLDNHSLYDMTRGIQLPAKSEEEIFEHLGLEYLEPFYRNA

SEQ ID NO: 5309 - DNA, 1587 bp, synthetic construct
  misc_feature 1..1587: note = Variant of terminal deoxynucleotidyltransferase
  source 1..1587: mol_type = other DNA
atgcaccatcatcatcatcatggcggtagcggcagccacggcattcgtaccatcgattcggacttcgggaagaaacagcagaaaaaaggcgataaccacgatagttccgccacttatgaaatcaaatttcacgagtttgtgctgttcattctcgaagaaaaaatgggtgcgacgcgtcgtacttttctgacagatttagcccgcaagaaagggttccgcgtcgagaatgaactgaccgacgaagttacccacatcgtggcagaaaatctgtcacgctctgaagtattggcttggctgaaagaacacaagatggagaagaccaagcaattcgaactgctggatattagctggcttatcgaaagcatgaaagttggtaaaccggtggacaccaaggggaaataccagttggcggaatcggttgaggtgagtgcgaacccagatccgacagaaggtcgtgtaaacgagctgcctcctactatgaaaaccgtttctccgtatgcgtgtcaacgccgcaccaccctgaacaaccgtaatcaacgttttacggactcgctggagattcttcgcgagaattacgtgtttaaaggcaacgacgatactgcgctggaatttcgtcgtgctatctccgtgctgaaaagccttccgtttgaggtacgtagcctgaaagacacggaaggattgccctggatcagtgatgaagtcaaagggattatggaagaaatcatcgaagtcggggagtcgcgtgaagtgcaggccgtgctcaatgatgagtggtatcaaagcttccacgcatttacgcgtgtctttggagtgggggtaggcacagcagacaagtggtaccagatgggtctgcgcaccctggaggatgttcgttccagcaagaccctgaagttgaccacgtgggcgaaagtaggtctgacgtattatgaagatcttgctcgcggcgttacccgtgcggaagctgacgcgatttggctgctggttcaggatgcagtcgcaactttcgacccggatgcgatcgtggagattgtcggtggacagcgtcgtgggaaacctcagtctcacgacgttgatctgcttatcagttctccgggagctgaaaaagagcaagaagaccaactcctgcagaaagtgatgaatctgtggaagaaacaagggttgttgctgtgtggtaaagtggtgtggagtcagtgggaatgggggggtctgccgtccggtaaggcttcggagggtgacggggaggcatcgtgctttctgatcctcaaactttatgatcatctggtgcgtaaaagtaaacataatatgccgactggttcgaacatgggcgagtccaaaccgtggaaagcaattaaagtagatctgctgcgttgcccccgcggcagttttgcgtttgcgatgttgcagtggaccggaagccgcatgttccgtcgcgatctgcgcgattacgcccgcgaagagaagaacatgatgctggacaatcatagcctgtatgacatgactcgtggtatccaactccctgctaaatcggaagaggaaattttcgaacatctggggcttgaatacctggaaccgttctatcgtaacgca

SEQ ID NO: 5310 - protein, 529 aa, synthetic construct
  REGION 1..529: note = Variant of terminal deoxynucleotidyltransferase
MHHHHHHGGSGSHGIRTIDSDFGKKQQKKGDNHDSSATYEIKFHEFVLFILEEKMGATRRTFLTDLARKKGFRVENELTDEVTHIVAENLSRSEVLAWLKEHKMEKTKQFELLDISWLIESMKVGKPVDTKGKYQLAESVEVSANPDPTEGRVNELPPTMKTVSPYACQRRTTLNNRNQRFTDSLEILRENYVFKGNDDTALEFRRAISVLKSLPFEVRSLKDTEGLPWISDEVKGIMEEIIEVGESREVQAVLNDEWYQSFHAFTRVFGVGVGTADKWYQMGLRTLEDVRSSKTLKLTTWAKVGLTYYEDLARGVTRAEADAIWLLVQDAVATFDPDAIVEIVGGQRRGKPQSHDVDLLISSPGAEKEQEDQLLQKVMNLWKKQGLLLCGKVVWSQWEWGGLPSGKASEGDGEASCFLILKLYDHLVRKSKHNMPTGSNMGESKPWKAIKVDLLRCPRGSFAFAMLQWTGSRMFRRDLRDYAREEKNMMLDNHSLYDMTRGIQLPAKSEEEIFEHLGLEYLEPFYRNA

SEQ ID NO: 5311 - DNA, 1587 bp, synthetic construct
  misc_feature 1..1587: note = Variant of terminal deoxynucleotidyltransferase
  source 1..1587: mol_type = other DNA
atgcaccatcatcatcatcatggcggtagcggcagccacggcattcgtaccatcgattcggacttcgggaagaaacagcagaaaaaaggcgataaccacgatagttccgccacttatgaaatcaaatttcacgagtttgtgctgttcattctcgaagaaaaaatgggtgcgacgcgtcgtacttttctgacagatttagcccgcaagaaagggttccgcgtcgagaatgaactgaccgacgaagttacccacatcgtggcagaaaatctgtcacgctctgaagtattggcttggctgaaagaacacaagatggagaagaccaagcaattcgaactgctggatattagctggcttatcgaaagcatgaaagttggtaaaccggtggacaccaaggggaaataccagttggcggaatcggttgaggtgagtgcgaacccagatccgacagaaggtcgtgtaaacgagctgcctcctactatgaaaaccgtttctccgtatgcgtgtcaacgccgcaccaccctgaacaaccgtaatcaacgttttacggactcgctggagattcttcgcgagaattactcttttaaaggcaacgacgatactgcgctggaatttcgtcgtgctatctccgtgctgaaaagccttccgtttgaggtacgtagcctgaaagacacggaaggattgccctggatcagtgatgaagtcaaagggattatggaagaaatcatcgaagtcggggagtcgcgtgaagtgcaggccgtgctcaatgatgagtggtatcaaagcttccacgcatttacgcgtgtctttggagtgggggtaggcacagcagacaagtggtaccagatgggtctgcgcaccctggaggatgttcgttccagcaagaccctgaagttgaccacgtgggcgaaagtaggtctgacgtattatgaagatcttgctcgcggcgttacccgtgcggaagctgacgcgatttggctgctggttcaggatgcagtcgcaactttcgacccggatgcgatcgtggagattgtcggtggacagcgtcgtgggaaacctcagtctcacgacgttgatctgcttatcagttctccgggagctgaaaaagagcaagaagaccaactcctgcagaaagtgatgaatctgtggaagaaacaagggttgttgctgtgtggtaaagtggtgtggagtcagtgggaatgggggggtctgccgtccggtaaggctgatgagggtgacggggaggcatcgtgctttctgatcctcaaactttatgatcatctggtgcgtaaaagtaaacataatatgccgactggttcgaacatgggcgagtccaaaccgtggaaagcaattaaagtagatctgctgcgttgcccccgcggcagttttgcgtttgcgatgttgcagtggaccggaagccgcatgttccgtcgcgatctgcgcgattacgcccgcgaagagaagaacatgatgctggacaatcatagcctgtatgacatgactcgtggtatccaactccctgctaaatcggaagaggaaattttcgaacatctggggcttgaatacctggaaccgttctatcgtaacgca

SEQ ID NO: 5312 - protein, 529 aa, synthetic construct
  REGION 1..529: note = Variant of terminal deoxynucleotidyltransferase
MHHHHHHGGSGSHGIRTIDSDFGKKQQKKGDNHDSSATYEIKFHEFVLFILEEKMGATRRTFLTDLARKKGFRVENELTDEVTHIVAENLSRSEVLAWLKEHKMEKTKQFELLDISWLIESMKVGKPVDTKGKYQLAESVEVSANPDPTEGRVNELPPTMKTVSPYACQRRTTLNNRNQRFTDSLEILRENYSFKGNDDTALEFRRAISVLKSLPFEVRSLKDTEGLPWISDEVKGIMEEIIEVGESREVQAVLNDEWYQSFHAFTRVFGVGVGTADKWYQMGLRTLEDVRSSKTLKLTTWAKVGLTYYEDLARGVTRAEADAIWLLVQDAVATFDPDAIVEIVGGQRRGKPQSHDVDLLISSPGAEKEQEDQLLQKVMNLWKKQGLLLCGKVVWSQWEWGGLPSGKADEGDGEASCFLILKLYDHLVRKSKHNMPTGSNMGESKPWKAIKVDLLRCPRGSFAFAMLQWTGSRMFRRDLRDYAREEKNMMLDNHSLYDMTRGIQLPAKSEEEIFEHLGLEYLEPFYRNA

SEQ ID NO: 5313 - DNA, 1587 bp, synthetic construct
  misc_feature 1..1587: note = Variant of terminal deoxynucleotidyltransferase
  source 1..1587: mol_type = other DNA
atgcaccatcatcatcatcatggcggtagcggcagccacggcattcgtaccatcgattcggacttcgggaagaaacagcagaaaaaaggcgataaccacgatagttccgccacttatgaaatcaaatttcacgagtttgtgctgttcattctcgaagaaaaaatgggtgcgacgcgtcgtacttttctgacagatttagcccgcaagaaagggttccgcgtcgagaatgaactgaccgacgaagttacccacatcgtggcagaaaatctgtcacgctctgaagtattggcttggctgaaagaacacaagatggagaagaccaagcaattcgaactgctggatattagctggcttatcgaaagcatgaaagttggtaaaccggtggacaccaaggggaaataccagttggcggaatcggttgaggtgagtgcgaacccagatccgacagaaggtcgtgtaaacgagctgcctcctactatgaaaaccgtttctccgtatgcgtgtcaacgccgcaccaccctgaacaaccgtaatcaacgttttacggactcgctggagattcttcgcgagaattacgtgtttaaaggcaacgacgatactgcgctggaatttcgtcgtgctatctccgtgctgaaaagccttccgtttgaggtacgtagcctgaaagacacggaaggattgccctggatcagtgatgaagtcaaagggattatggaagaaatcatcgaagtcggggagtcgcgtgaagtgcaggccgtgctcaatgatgagtggtatcaaagcttccacgcatttacgcgtgtctttggagtgggggtaggcacagcagacaagtggtaccagatgggtctgcgcaccctggaggatgttcgttccagcaagaccctgaagttgaccacgtgggcgaaagtaggtctgacgtattatgaagatcttgctcgcggcgttacccgtgcggaagctgacgcgatttggctgctggttcaggatgcagtcgcaactttcgacccggatgcgatcgtggagattgtcggtggacagcgtcgtgggaaacctcagtctcacgacgttgatctgcttatcagttctccgggagctgaaaaagagcaagaagaccaactcctgcagaaagtgatgaatctgtggaagaaacaagggttgttgctgtgtggtaaagtggtgtggagtcagtgggaatgggggggtaggccgtccggtaaggctgatgagggtgacggggaggcatcgtgctttctgatcctcaaactttatgatcatctggtgcgtaaaagtaaacataatatgccgactggttcgaacatgggcgagtccaaaccgtggaaagcaattaaagtagatctgctgcgttgcccccgcggcagttttgcgtttgcgatgttgcagtggaccggaagccgcatgttccgtcgcgatctgcgcgattacgcccgcgaagagaagaacatgatgctggacaatcatagcctgtatgacatgactcgtggtatccaactccctgctaaatcggaagaggaaattttcgaacatctggggcttgaatacctggaaccgttctatcgtaacgca

SEQ ID NO: 5314 - protein, 529 aa, synthetic construct
  REGION 1..529: note = Variant of terminal deoxynucleotidyltransferase
MHHHHHHGGSGSHGIRTIDSDFGKKQQKKGDNHDSSATYEIKFHEFVLFILEEKMGATRRTFLTDLARKKGFRVENELTDEVTHIVAENLSRSEVLAWLKEHKMEKTKQFELLDISWLIESMKVGKPVDTKGKYQLAESVEVSANPDPTEGRVNELPPTMKTVSPYACQRRTTLNNRNQRFTDSLEILRENYVFKGNDDTALEFRRAISVLKSLPFEVRSLKDTEGLPWISDEVKGIMEEIIEVGESREVQAVLNDEWYQSFHAFTRVFGVGVGTADKWYQMGLRTLEDVRSSKTLKLTTWAKVGLTYYEDLARGVTRAEADAIWLLVQDAVATFDPDAIVEIVGGQRRGKPQSHDVDLLISSPGAEKEQEDQLLQKVMNLWKKQGLLLCGKVVWSQWEWGGRPSGKADEGDGEASCFLILKLYDHLVRKSKHNMPTGSNMGESKPWKAIKVDLLRCPRGSFAFAMLQWTGSRMFRRDLRDYAREEKNMMLDNHSLYDMTRGIQLPAKSEEEIFEHLGLEYLEPFYRNA

SEQ ID NO: 5315 - DNA, 1587 bp, synthetic construct
  misc_feature 1..1587: note = Variant of terminal deoxynucleotidyltransferase
  source 1..1587: mol_type = other DNA
atgcaccatcatcatcatcatggcggtagcggcagccacggcattcgtaccatcgattcggacttcgggaagaaacagcagaaaaaaggcgataaccacgatagttccgccacttatgaaatcaaatttcacgagtttgtgctgttcattctcgaagaaaaaatgggtgcgacgcgtcgtacttttctgacagatttagcccgcaagaaagggttccgcgtcgagaatgaactgaccgacgaagttacccacatcgtggcagaaaatctgtcacgctctgaagtattggcttggctgaaagaacacaagatggagaagaccaagcaattcgaactgctggatattagctggcttatcgaaagcatgaaagttggtaaaccggtggacaccaaggggaaataccagttggcggaatcggttgaggtgagtgcgaacccagatccgacagaaggtcgtgtaaacgagctgcctcctactatgaaaaccgtttctccgtatgcgtgtcaacgccgcaccaccctgaacaaccgtaatcaacgttttacggactcgctggagattcttcgcgagaattacgtgtttaaaggcaacgacgatactgcgctggaatttcgtcgtgctatctccgtgctgaaaagccttccgtttgaggtacgtagcctgaaagacacggaaggattgccctggatcagtgatgaagtcaaagggattatggaagaaatcatcgaagtcggggagtcgcgtgaagtgcaggccgtgctcaatgatgagtggtatcaaagcttccacgcatttacgcgtgtctttggagtgggggtaggcacagcagacaagtggtaccagatgggtctgcgcaccctggaggatgttcgttccagcaaggggctgaagttgaccacgtgggcgaaagtaggtctgacgtattatgaagatcttgctcgcggcgttacccgtgcggaagctgacgcgatttggctgctggttcaggatgcagtcgcaactttcgacccggatgcgatcgtggagattgtcggtggacagcgtcgtgggaaacctcagtctcacgacgttgatctgcttatcagttctccgggagctgaaaaagagcaagaagaccaactcctgcagaaagtgatgaatctgtggaagaaacaagggttgttgctgtgtggtaaagtggtgtggagtcagtgggaatgggggggtctgccgtccggtaaggctgatgagggtgacggggaggcatcgtgctttctgatcctcaaactttatgatcatctggtgcgtaaaagtaaacataatatgccgactggttcgaacatgggcgagtccaaaccgtggaaagcaattaaagtagatctgctgcgttgcccccgcggcagttttgcgtttgcgatgttgcagtggaccggaagccgcatgttccgtcgcgatctgcgcgattacgcccgcgaagagaagaacatgatgctggacaatcatagcctgtatgacatgactcgtggtatccaactccctgctaaatcggaagaggaaattttcgaacatctggggcttgaatacctggaaccgttctatcgtaacgca

SEQ ID NO: 5316 - protein, 529 aa, synthetic construct
  REGION 1..529: note = Variant of terminal deoxynucleotidyltransferase
MHHHHHHGGSGSHGIRTIDSDFGKKQQKKGDNHDSSATYEIKFHEFVLFILEEKMGATRRTFLTDLARKKGFRVENELTDEVTHIVAENLSRSEVLAWLKEHKMEKTKQFELLDISWLIESMKVGKPVDTKGKYQLAESVEVSANPDPTEGRVNELPPTMKTVSPYACQRRTTLNNRNQRFTDSLEILRENYVFKGNDDTALEFRRAISVLKSLPFEVRSLKDTEGLPWISDEVKGIMEEIIEVGESREVQAVLNDEWYQSFHAFTRVFGVGVGTADKWYQMGLRTLEDVRSSKGLKLTTWAKVGLTYYEDLARGVTRAEADAIWLLVQDAVATFDPDAIVEIVGGQRRGKPQSHDVDLLISSPGAEKEQEDQLLQKVMNLWKKQGLLLCGKVVWSQWEWGGLPSGKADEGDGEASCFLILKLYDHLVRKSKHNMPTGSNMGESKPWKAIKVDLLRCPRGSFAFAMLQWTGSRMFRRDLRDYAREEKNMMLDNHSLYDMTRGIQLPAKSEEEIFEHLGLEYLEPFYRNA

SEQ ID NO: 5317 - DNA, 1587 bp, synthetic construct
  misc_feature 1..1587: note = Variant of terminal deoxynucleotidyltransferase
  source 1..1587: mol_type = other DNA
atgcaccatcatcatcatcatggcggtagcggcagccacggcattcgtaccatcgattcggacttcgggaagaaacagcagaaaaaaggcgataaccacgatagttccgccacttatgaaatcaaatttcacgagtttgtgctgttcattctcgaagaaaaaatgggtgcgacgcgtcgtacttttctgacagatttagcccgcaagaaagggttccgcgtcgagaatgaactgaccgacgaagttacccacatcgtggcagaaaatctgtcacgctctgaagtattggcttggctgaaagaacacaagatggagaagaccaagcaattcgaactgctggatattagctggcttatcgaaagcatgaaagttggtaaaccggtggacaccaaggggaaataccagttggcggaatcggttgaggtgagtgcgaacccagatccgacagaaggtcgtgtaaacgagctgcctcctactatgaaaaccgtttctccgtatgcgtgtcaacgccgcaccaccctgaaccatcgtaatcaacgttttacggactcgctggagattcttcgcgagaattacgtgtttaaaggcaacgacgatactgcgctggaatttcgtcgtgctatctccgtgctgaaaagccttccgtttgaggtacgtagcctgaaagacacggaaggattgccctggatcagtgatgaagtcaaagggattatggaagaaatcatcgaagtcggggagtcgcgtgaagtgcaggccgtgctcaatgatgagtggtatcaaagcttccacgcatttacgcgtgtctttggagtgggggtaggcacagcagacaagtggtaccagatgggtctgcgcaccctggaggatgttcgttccagcaagaccctgaagttgaccacgtgggcgaaagtaggtctgacgtattatgaagatcttgctcgcggcgttacccgtgcggaagctgacgcgatttggctgctggttcaggatgcagtcgcaactttcgacccggatgcgatcgtggagattgtcggtggacagcgtcgtgggaaacctcagtctcacgacgttgatctgcttatcagttctccgggagctgaaaaagagcaagaagaccaactcctgcagaaagtgatgaatctgtggaagaaacaagggttgttgctgtgtggtaaagtggtgtggagtcagtgggaatgggggggtctgccgtccggtaaggctgatgagggtgacggggaggcatcgtgctttctgatcctcaaactttatgatcatctggtgcgtaaaagtaaacataatatgccgactggttcgaacatgggcgagtccaaaccgtggaaagcaattaaagtagatctgctgcgttgcccccgcggcagttttgcgtttgcgatgttgcagtggaccggaagccgcatgttccgtcgcgatctgcgcgattacgcccgcgaagagaagaacatgatgctggacaatcatagcctgtatgacatgactcgtggtatccaactccctgctaaatcggaagaggaaattttcgaacatctggggcttgaatacctggaaccgttctatcgtaacgca

SEQ ID NO: 5318 - protein, 529 aa, synthetic construct
  REGION 1..529: note = Variant of terminal deoxynucleotidyltransferase
MHHHHHHGGSGSHGIRTIDSDFGKKQQKKGDNHDSSATYEIKFHEFVLFILEEKMGATRRTFLTDLARKKGFRVENELTDEVTHIVAENLSRSEVLAWLKEHKMEKTKQFELLDISWLIESMKVGKPVDTKGKYQLAESVEVSANPDPTEGRVNELPPTMKTVSPYACQRRTTLNHRNQRFTDSLEILRENYVFKGNDDTALEFRRAISVLKSLPFEVRSLKDTEGLPWISDEVKGIMEEIIEVGESREVQAVLNDEWYQSFHAFTRVFGVGVGTADKWYQMGLRTLEDVRSSKTLKLTTWAKVGLTYYEDLARGVTRAEADAIWLLVQDAVATFDPDAIVEIVGGQRRGKPQSHDVDLLISSPGAEKEQEDQLLQKVMNLWKKQGLLLCGKVVWSQWEWGGLPSGKADEGDGEASCFLILKLYDHLVRKSKHNMPTGSNMGESKPWKAIKVDLLRCPRGSFAFAMLQWTGSRMFRRDLRDYAREEKNMMLDNHSLYDMTRGIQLPAKSEEEIFEHLGLEYLEPFYRNA

SEQ ID NO: 5319 - DNA, 1587 bp, synthetic construct
  misc_feature 1..1587: note = Variant of terminal deoxynucleotidyltransferase
  source 1..1587: mol_type = other DNA
atgcaccatcatcatcatcatggcggtagcggcagccacggcattcgtaccatcgattcggacttcgggaagaaacagcagaaaaaaggcgataaccacgatagttccgccacttatgaaatcaaatttcacgagtttgtgctgttcattctcgaagaaaaaatgggtgcgacgcgtcgtacttttctgacagatttagcccgcaagaaagggttccgcgtcgagaatgaactgaccgacgaagttacccacatcgtggcagaaaatctgtcacgctctgaagtattggcttggctgaaagaacacaagatggagaagaccaagcaattcgaactgctggatattagctggcttatcgaaagcatgaaagttggtaaaccggtggacaccaaggggaaataccagttggcggaatcggttgaggtgagtgcgaacccagatccgacagaaggtcgtgtaaacgagctgcctcctactatgaaaaccgtttctccgtatgcgtgtcaacgccgcaccaccctgaacaaccgtaatcaacgttttacggactcgctggagattcttcgcgagaattacgtgtttaaaggcaacgacgatactgcgctggaatttcgtcgtgctatctccgtgctgaaaagccttccgtttgaggtacgtagcctgaaagacacggaaggattgccctggatcagtgatgaagtcaaagggattatggaagaaatcatcgaagtcggggagtcgcgtgaagtgcaggccgtgctcaatgatgagtggtatcaaagcttccacgcatttacgcgtgtctttggagtgggggtaggcacagcagacaagtggtaccagatgggtctgcgcaccctggaggatgttcgttccagcaagaccctgaagttgaccgcgtgggcgaaagtaggtctgacgtattatgaagatcttgctcgcggcgttacccgtgcggaagctgacgcgatttggctgctggttcaggatgcagtcgcaactttcgacccggatgcgatcgtggagattgtcggtggacagcgtcgtgggaaacctcagtctcacgacgttgatctgcttatcagttctccgggagctgaaaaagagcaagaagaccaactcctgcagaaagtgatgaatctgtggaagaaacaagggttgttgctgtgtggtaaagtgttttggagtcagtgggaatgggggggtctgccgtccggtaaggctgatgagggtgacggggaggcatcgtgctttctgatcctcaaactttatgatcatctggtgcgtaaaagtaaacataatatgccgactggttcgaacatgggcgagtccaaaccgtggaaagcaattaaagtagatctgctgcgttgcccccgcggcagttttgcgtttgcgatgttgcagtggaccggaagccgcatgttccgtcgcgatctgcgcgattacgcccgcgaagagaagaacatgatgctggacaatcatagcctgtatgacatgactcgtggtatccaactccctgctaaatcggaagaggaaattttcgaacatctggggcttgaatacctggaaccgttctatcgtaacgca

SEQ ID NO: 5320 - protein, 529 aa, synthetic construct
  REGION 1..529: note = Variant of terminal deoxynucleotidyltransferase
MHHHHHHGGSGSHGIRTIDSDFGKKQQKKGDNHDSSATYEIKFHEFVLFILEEKMGATRRTFLTDLARKKGFRVENELTDEVTHIVAENLSRSEVLAWLKEHKMEKTKQFELLDISWLIESMKVGKPVDTKGKYQLAESVEVSANPDPTEGRVNELPPTMKTVSPYACQRRTTLNNRNQRFTDSLEILRENYVFKGNDDTALEFRRAISVLKSLPFEVRSLKDTEGLPWISDEVKGIMEEIIEVGESREVQAVLNDEWYQSFHAFTRVFGVGVGTADKWYQMGLRTLEDVRSSKTLKLTAWAKVGLTYYEDLARGVTRAEADAIWLLVQDAVATFDPDAIVEIVGGQRRGKPQSHDVDLLISSPGAEKEQEDQLLQKVMNLWKKQGLLLCGKVFWSQWEWGGLPSGKADEGDGEASCFLILKLYDHLVRKSKHNMPTGSNMGESKPWKAIKVDLLRCPRGSFAFAMLQWTGSRMFRRDLRDYAREEKNMMLDNHSLYDMTRGIQLPAKSEEEIFEHLGLEYLEPFYRNA

SEQ ID NO: 5321 - DNA, 1587 bp, synthetic construct
  misc_feature 1..1587: note = Variant of terminal deoxynucleotidyltransferase
  source 1..1587: mol_type = other DNA
atgcaccatcatcatcatcatggcggtagcggcagccacggcattcgtaccatcgattcggacttcgggaagaaacagcagaaaaaaggcgataaccacgatagttccgccacttatgaaatcaaatttcacgagtttgtgctgttcattctcgaagaaaaaatgggtgcgacgcgtcgtacttttctgacagatttagcccgcaagaaagggttccgcgtcgagaatgaactgaccgacgaagttacccacatcgtggcagaaaatctgtcacgctctgaagtattggcttggctgaaagaacacaagatggagaagaccaagcaattcgaactgctggatattagctggcttatcgaaagcatgaaagttggtaaaccggtggacaccaaggggaaataccagttggcggaatcggttgaggtgagtgcgaacccagatccgacagaaggtcgtgtaaacgagctgcctcctactatgaaaaccgtttctccgtatgcgtgtcaacgccgcaccaccctgaacaaccgtaatcaacgttttacggactcgctggaggttcttcgcgagaattacgtgtttaaaggcaacgacgatactgcgctggaatttcgtcgtgctatctccgtgctgaaaagccttccgtttgaggtacgtagcctgaaagacacggaaggattgccctggatcagtgatgaagtcaaagggattatggaagaaatcatcgaagtcggggagtcgcgtgaagtgcaggccgtgctcaatgatgagtggtatcaaagcttccacgcatttacgcgtgtctttggagtgggggtaggcacagcagacaagtggtaccagatgggtctgcgcaccctggaggatgttcgttccagcaagaccctgaagttgaccacgtgggcgaaagtaggtctgacgtattatgaagatcttgctcgcggcgttacccgtgcggaagctgacgcgatttggctgctggttcaggatgcagtcgcaactttcgacccggatgcgatcgtggagattgtcggtggacagcgtcgtgggaaacctcagtctcacgacgttgatctgcttatcagttctccgggagctgaaaaagagcaagaagaccaactcctgcagaaagtgatgaatctgtggaagaaacaagggttgttgctgtgtggtaaagtggtgtggagtcagtgggaatgggggggtctgccgtccggtaaggctgatgagggtgacggggaggcatcgtgctttctgatcctcaaactttatgatcatctggtgcgtaaaagtaaacataatatgccgactggttcgaacatgggcgagtccaaaccgtggaaagcaattaaagtagatctgctgcgttgcccccgcggcagttttgcgtttgcgatgttgcagtggaccggaagccgcatgttccgtcgcgatctgcgcgattacgcccgcgaagagaagaacatgatgctggacaatcatagcctgtatgacatgactcgtggtatccaactccctgctaaatcggaagaggaaattttcgaacatctggggcttgaatacctggaaccgttctatcgtaacgca

SEQ ID NO: 5322 - protein, 529 aa, synthetic construct
  REGION 1..529: note = Variant of terminal deoxynucleotidyltransferase
MHHHHHHGGSGSHGIRTIDSDFGKKQQKKGDNHDSSATYEIKFHEFVLFILEEKMGATRRTFLTDLARKKGFRVENELTDEVTHIVAENLSRSEVLAWLKEHKMEKTKQFELLDISWLIESMKVGKPVDTKGKYQLAESVEVSANPDPTEGRVNELPPTMKTVSPYACQRRTTLNNRNQRFTDSLEVLRENYVFKGNDDTALEFRRAISVLKSLPFEVRSLKDTEGLPWISDEVKGIMEEIIEVGESREVQAVLNDEWYQSFHAFTRVFGVGVGTADKWYQMGLRTLEDVRSSKTLKLTTWAKVGLTYYEDLARGVTRAEADAIWLLVQDAVATFDPDAIVEIVGGQRRGKPQSHDVDLLISSPGAEKEQEDQLLQKVMNLWKKQGLLLCGKVVWSQWEWGGLPSGKADEGDGEASCFLILKLYDHLVRKSKHNMPTGSNMGESKPWKAIKVDLLRCPRGSFAFAMLQWTGSRMFRRDLRDYAREEKNMMLDNHSLYDMTRGIQLPAKSEEEIFEHLGLEYLEPFYRNA

SEQ ID NO: 5323 - DNA, 1587 bp, synthetic construct
  misc_feature 1..1587: note = Variant of terminal deoxynucleotidyltransferase
  source 1..1587: mol_type = other DNA
atgcaccatcatcatcatcatggcggtagcggcagccacggcattcgtaccatcgattcggacttcgggaagaaacagcagaaaaaaggcgataaccacgatagttccgccacttatgaaatcaaatttcacgagtttgtgctgttcattctcgaagaaaaaatgggtgcgacgcgtcgtacttttctgacagatttagcccgcaagaaagggttccgcgtcgagaatgaactgaccgacgaagttacccacatcgtggcagaaaatctgtcacgctctgaagtattggcttggctgaaagaacacaagatggagaagaccaagcaattcgaactgctggatattagctggcttatcgaaagcatgaaagttggtaaaccggtggacaccaaggggaaataccagttggcggaatcggttgaggtgagtgcgaacccagatccgacagaaggtcgtgtaaacgagctgcctcctactatgaaaaccgtttctccgtatgcgtgtcaacgccgcaccaccctgaacaaccgtaatcaacgttttacggactcgctggagattcttcgcgagaattacgtgtttctgggcaacgacgatactgcgctggaatttcgtcgtgctatctccgtgctgaaaagccttccgtttgaggtacgtagcctgaaagacacggaaggattgccctggatcagtgatgaagtcaaagggattatggaagaaatcatcgaagtcggggagtcgcgtgaagtgcaggccgtgctcaatgatgagtggtatcaaagcttccacgcatttacgcgtgtctttggagtgggggtaggcacagcagacaagtggtaccagatgggtctgcgcaccctggaggatgttcgttccagcaagaccctgaagttgaccacgtgggcgaaagtaggtctgacgtattatgaagatcttgctcgcggcgttacccgtgcggaagctgacgcgatttggctgctggttcaggatgcagtcgcaactttcgacccggatgcgatcgtggagattgtcggtggacagcgtcgtgggaaacctcagtctcacgacgttgatctgcttatcagttctccgggagctgaaaaagagcaagaagaccaactcctgcagaaagtgatgaatctgtggaagaaacaagggttgttgctgtgtggtaaagtggtgtggagtcagtgggaatgggggggtctgccgtccggtaaggctgatgagggtgacggggaggcatcgtgctttctgatcctcaaactttatgatcatctggtgcgtaaaagtaaacataatatgccgactggttcgaacatgggcgagtccaaaccgtggaaagcaattaaagtagatctgctgcgttgcccccgcggcagttttgcgtttgcgatgttgcagtggaccggaagccgcatgttccgtcgcgatctgcgcgattacgcccgcgaagagaagaacatgatgctggacaatcatagcctgtatgacatgactcgtggtatccaactccctgctaaatcggaagaggaaattttcgaacatctggggcttgaatacctggaaccgttctatcgtaacgca

SEQ ID NO: 5324 - protein, 529 aa, synthetic construct
  REGION 1..529: note = Variant of terminal deoxynucleotidyltransferase
MHHHHHHGGSGSHGIRTIDSDFGKKQQKKGDNHDSSATYEIKFHEFVLFILEEKMGATRRTFLTDLARKKGFRVENELTDEVTHIVAENLSRSEVLAWLKEHKMEKTKQFELLDISWLIESMKVGKPVDTKGKYQLAESVEVSANPDPTEGRVNELPPTMKTVSPYACQRRTTLNNRNQRFTDSLEILRENYVFLGNDDTALEFRRAISVLKSLPFEVRSLKDTEGLPWISDEVKGIMEEIIEVGESREVQAVLNDEWYQSFHAFTRVFGVGVGTADKWYQMGLRTLEDVRSSKTLKLTTWAKVGLTYYEDLARGVTRAEADAIWLLVQDAVATFDPDAIVEIVGGQRRGKPQSHDVDLLISSPGAEKEQEDQLLQKVMNLWKKQGLLLCGKVVWSQWEWGGLPSGKADEGDGEASCFLILKLYDHLVRKSKHNMPTGSNMGESKPWKAIKVDLLRCPRGSFAFAMLQWTGSRMFRRDLRDYAREEKNMMLDNHSLYDMTRGIQLPAKSEEEIFEHLGLEYLEPFYRNA

SEQ ID NO: 5325 - DNA, 1587 bp, synthetic construct
  misc_feature 1..1587: note = Variant of terminal deoxynucleotidyltransferase
  source 1..1587: mol_type = other DNA
atgcaccatcatcatcatcatggcggtagcggcagccacggcattcgtaccatcgattcggacttcgggaagaaacagcagaaaaaaggcgataaccacgatagttccgccacttatgaaatcaaatttcacgagtttgtgctgttcattctcgaagaaaaaatgggtgcgacgcgtcgtacttttctgacagatttagcccgcaagaaagggttccgcgtcgagaatgaactgaccgacgaagttacccacatcgtggcagaaaatctgtcacgctctgaagtattggcttggctgaaagaacacaagatggagaagaccaagcaattcgaactgctggatattagctggcttatcgaaagcatgaaagttggtaaaccggtggacaccaaggggaaataccagttggcggaatcggttgaggtgagtgcgaacccagatccgacagaaggtcgtgtaaacgagctgcctcctactatgaaaaccgtttctccgtatgcgtgtcaacgccgcaccaccctgaacaaccgtaatcaacgttttacggactcgctggagattcttcgcgagaattacgtgtttaaaggcaacgacagtactgcgctggaatttcgtcgtgctatctccgtgctgaaaagccttccgtttgaggtacgtagcctgaaagacacggaaggattgccctggatcagtgatgaagtcaaagggattatggaagaaatcatcgaagtcggggagtcgcgtgaagtgcaggccgtgctcaatgatgagtggtatcaaagcttccacgcatttacgcgtgtctttggagtgggggtaggcacagcagacaagtggtaccagatgggtctgcgcaccctggaggatgttcgttccagcaagaccctgaagttgaccacgtgggcgaaagtaggtctgacgtattatgaagatcttgctcgcggcgttacccgtgcggaagctgacgcgatttggctgctggttcaggatgcagtcgcaactttcgacccggatgcgatcgtggagattgtcggtggacagcgtcgtgggaaacctcagtctcacgacgttgatctgcttatcagttctccgggagctgaaaaagagcaagaagaccaactcctgcagaaagtgatgaatctgtggaagaaacaagggttgttgctgtgtggtaaagtggtgtggagtcagtgggaatgggggggtctgccgtccggtaaggctgatgagggtgacggggaggcatcgtgctttctgatcctcaaactttatgatcatctggtgcgtaaaagtaaacataatatgccgactggttcgaacatgggcgagtccaaaccgtggaaagcaattaaagtagatctgctgcgttgcccccgcggcagttttgcgtttgcgatgttgcagtggaccggaagccgcatgttccgtcgcgatctgcgcgattacgcccgcgaagagaagaacatgatgctggacaatcatagcctgtatgacatgactcgtggtatccaactccctgctaaatcggaagaggaaattttcgaacatctggggcttgaatacctggaaccgttctatcgtaacgca

SEQ ID NO: 5326 - protein, 529 aa, synthetic construct
  REGION 1..529: note = Variant of terminal deoxynucleotidyltransferase
MHHHHHHGGSGSHGIRTIDSDFGKKQQKKGDNHDSSATYEIKFHEFVLFILEEKMGATRRTFLTDLARKKGFRVENELTDEVTHIVAENLSRSEVLAWLKEHKMEKTKQFELLDISWLIESMKVGKPVDTKGKYQLAESVEVSANPDPTEGRVNELPPTMKTVSPYACQRRTTLNNRNQRFTDSLEILRENYVFKGNDSTALEFRRAISVLKSLPFEVRSLKDTEGLPWISDEVKGIMEEIIEVGESREVQAVLNDEWYQSFHAFTRVFGVGVGTADKWYQMGLRTLEDVRSSKTLKLTTWAKVGLTYYEDLARGVTRAEADAIWLLVQDAVATFDPDAIVEIVGGQRRGKPQSHDVDLLISSPGAEKEQEDQLLQKVMNLWKKQGLLLCGKVVWSQWEWGGLPSGKADEGDGEASCFLILKLYDHLVRKSKHNMPTGSNMGESKPWKAIKVDLLRCPRGSFAFAMLQWTGSRMFRRDLRDYAREEKNMMLDNHSLYDMTRGIQLPAKSEEEIFEHLGLEYLEPFYRNA

SEQ ID NO: 5327 - DNA, 1587 bp, synthetic construct
  misc_feature 1..1587: note = Variant of terminal deoxynucleotidyltransferase
  source 1..1587: mol_type = other DNA
atgcaccatcatcatcatcatggcggtagcggcagccacggcattcgtaccatcgattcggacttcgggaagaaacagcagaaaaaaggcgataaccacgatagttccgccacttatgaaatcaaatttcacgagtttgtgctgttcattctcgaagaaaaaatgggtgcgacgcgtcgtacttttctgacagatttagcccgcaagaaagggttccgcgtcgagaatgaactgaccgacgaagttacccacatcgtggcagaaaatctgtcacgctctgaagtattggcttggctgaaagaacacaagatggagaagaccaagcaattcgaactgctggatattagctggcttatcgaaagcatgaaagttggtaaaccggtggacaccaaggggaaataccagttggcggaatcggttgaggtgagtgcgaacccagatccgacagaaggtcgtgtaaacgagctgcctcctactatgaaaaccgtttctccgtatgcgtgtcaacgccgcaccaccctgaacaaccgtaatcaacgttttacggactcgctggagattcttcgcgagaattacgtgtttaaaggcaacgacgatactgcgctggaatttcgtcgtgctatctccgtgctgaaaagccttccgtttgaggtacgtagcctgaaagacacggaaggattgccctggatcagtgatgaagtcaaagggattatggaagaaatcatcgaagtcggggagtcgcgtgaagtgcaggccgtgctcaatgatgagtggtatcaaagcttccacgcatttacgcgtgtctttggagtgggggtaggcacagcagacaagtggtaccagatgggtctgcgcaccctggaggatgttcgttccagcaagaccctgaagttgaccacgtgggcgaaagtaggtctgacgtattatgaagatcttgctcgcggcgttacccgtgcggaagctgacgcgatttggatgctggttcaggatgcagtcgcaactttcgacccggatgcgatcgtggagattgtcggtggacagcgtcgtgggaaacctcagtctcacgacgttgatctgcttatcagttctccgggagctgaaaaagagcaagaagaccaactcctgcagaaagtgatgcgtctgtggaagaaacaagggttgttgctgtgtggtaaagtggtgtggagtcagtgggaatgggggggtctgccgtccggtaaggctgatgagggtgacggggaggcatcgtgctttctgatcctcaaactttatgatcatctggtgcgtaaaagtaaacataatatgccgactggttcgaacatgggcgagtccaaaccgtggaaagcaattaaagtagatctgctgcgttgcccccgcggcagttttgcgtttgcgatgttgcagtggaccggaagccgcatgttccgtcgcgatctgcgcgattacgcccgcgaagagaagaacatgatgctggacaatcatagcctgtatgacatgactcgtggtatccaactccctgctaaatcggaagaggaaattttcgaacatctggggcttgaatacctggaaccgttctatcgtaacgca

SEQ ID NO: 5328 - protein, 529 aa, synthetic construct
  REGION 1..529: note = Variant of terminal deoxynucleotidyltransferase
MHHHHHHGGSGSHGIRTIDSDFGKKQQKKGDNHDSSATYEIKFHEFVLFILEEKMGATRRTFLTDLARKKGFRVENELTDEVTHIVAENLSRSEVLAWLKEHKMEKTKQFELLDISWLIESMKVGKPVDTKGKYQLAESVEVSANPDPTEGRVNELPPTMKTVSPYACQRRTTLNNRNQRFTDSLEILRENYVFKGNDDTALEFRRAISVLKSLPFEVRSLKDTEGLPWISDEVKGIMEEIIEVGESREVQAVLNDEWYQSFHAFTRVFGVGVGTADKWYQMGLRTLEDVRSSKTLKLTTWAKVGLTYYEDLARGVTRAEADAIWMLVQDAVATFDPDAIVEIVGGQRRGKPQSHDVDLLISSPGAEKEQEDQLLQKVMRLWKKQGLLLCGKVVWSQWEWGGLPSGKADEGDGEASCFLILKLYDHLVRKSKHNMPTGSNMGESKPWKAIKVDLLRCPRGSFAFAMLQWTGSRMFRRDLRDYAREEKNMMLDNHSLYDMTRGIQLPAKSEEEIFEHLGLEYLEPFYRNA

SEQ ID NO: 5329 - DNA, 1587 bp, synthetic construct
  misc_feature 1..1587: note = Variant of terminal deoxynucleotidyltransferase
  source 1..1587: mol_type = other DNA
atgcaccatcatcatcatcatggcggtagcggcagccacggcattcgtaccatcgattcggacttcgggaagaaacagcagaaaaaaggcgataaccacgatagttccgccacttatgaaatcaaatttcacgagtttgtgctgttcattctcgaagaaaaaatgggtgcgacgcgtcgtacttttctgacagatttagcccgcaagaaagggttccgcgtcgagaatgaactgaccgacgaagttacccacatcgtggcagaaaatctgtcacgctctgaagtattggcttggctgaaagaacacaagatggagaagaccaagcaattcgaactgctggatattagctggcttatcgaaagcatgaaagttggtaaaccggtggacaccaaggggaaataccagttggcggaatcggttgaggtgagtgcgaacccagatccgacagaaggtcgtgtaaacgagctgcctcctactatgaaaaccgtttctccgtatgcgtgtcaacgccgcaccaccctgaacaaccgtaatcaacgttttacggactcgctggagattcttcgcgagaattacgtgtttaaaggcaacgacgatactgcgctggcgtttcgtcgtgctatctccgtgctgaaaagccttccgtttgaggtacgtagcctgaaagacacggaaggattgccctggatcagtgatgaagtcaaagggattatggaagaaatcatcgaagtcggggagtcgcgtgaagtgcaggccgtgctcaatgatgagtggtatcaaagcttccacgcatttacgcgtgtctttggagtgggggtaggcacagcagacaagtggtaccagatgggtctgcgcaccctggaggatgttcgttccagcaagaccctgaagttgaccacgtgggcgaaagtaggtctgacgtattatgaagatcttgctcgcggcgttacccgtgcggaagctgacgcgatttggctgctggttcaggatgcagtcgcaactttcgacccggatgcgatcgtggagattgtcggtggacagcgtcgtgggaaacctcagtctcacgacgttgatctgcttatcagttctccgggagctgaaaaagagcaagaagaccaactcctgcagaaagtgatgaatctgtggaagaaacaagggttgttgctgtgtggtaaagtggtgtggagtcagtgggaatgggggggtctgccgtccggtaaggctgatgagggtgacggggaggcatcgtgctttctgatcctcaaactttatgatcatctggtgcgtaaaagtaaacataatatgccgactggttcgaacatgggcgagtccaaaccgtggaaagcaattaaagtagatctgctgcgttgcccccgcggcagttttgcgtttgcgatgttgcagtggaccggaagccgcatgttccgtcgcgatctgcgcgattacgcccgcgaagagaagaacatgatgctggacaatcatagcctgtatgacatgactcgtggtatccaactccctgctaaatcggaagaggaaattttcgaacatctggggcttgaatacctggaaccgttctatcgtaacgca

SEQ ID NO: 5330 - protein, 529 aa, synthetic construct
  REGION 1..529: note = Variant of terminal deoxynucleotidyltransferase
MHHHHHHGGSGSHGIRTIDSDFGKKQQKKGDNHDSSATYEIKFHEFVLFILEEKMGATRRTFLTDLARKKGFRVENELTDEVTHIVAENLSRSEVLAWLKEHKMEKTKQFELLDISWLIESMKVGKPVDTKGKYQLAESVEVSANPDPTEGRVNELPPTMKTVSPYACQRRTTLNNRNQRFTDSLEILRENYVFKGNDDTALAFRRAISVLKSLPFEVRSLKDTEGLPWISDEVKGIMEEIIEVGESREVQAVLNDEWYQSFHAFTRVFGVGVGTADKWYQMGLRTLEDVRSSKTLKLTTWAKVGLTYYEDLARGVTRAEADAIWLLVQDAVATFDPDAIVEIVGGQRRGKPQSHDVDLLISSPGAEKEQEDQLLQKVMNLWKKQGLLLCGKVVWSQWEWGGLPSGKADEGDGEASCFLILKLYDHLVRKSKHNMPTGSNMGESKPWKAIKVDLLRCPRGSFAFAMLQWTGSRMFRRDLRDYAREEKNMMLDNHSLYDMTRGIQLPAKSEEEIFEHLGLEYLEPFYRNA

SEQ ID NO: 5331 - DNA, 1587 bp, synthetic construct
  misc_feature 1..1587: note = Variant of terminal deoxynucleotidyltransferase
  source 1..1587: mol_type = other DNA
atgcaccatcatcatcatcatggcggtagcggcagccacggcattcgtaccatcgattcggacttcgggaagaaacagcagaaaaaaggcgataaccacgatagttccgccacttatgaaatcaaatttcacgagtttgtgctgttcattctcgaagaaaaaatgggtgcgacgcgtcgtacttttctgacagatttagcccgcaagaaagggttccgcgtcgagaatgaactgaccgacgaagttacccacatcgtggcagaaaatctgtcacgctctgaagtattggcttggctgaaagaacacaagatggagaagaccaagcaattcgaactgctggatattagctggcttatcgaaagcatgaaagttggtaaaccggtggacaccaaggggaaataccagttggcggaatcggttgaggtgagtgcgaacccagatccgacagaaggtcgtgtaaacgagctgcctcctactatgaaaaccgtttctccgtatgcgtgtcaacgccgcaccaccctgaacaaccgtaatcaacgttttacggactcgctggagattcttcgcgagaattacgtgtttaaaggcaacgacgatactgcgctgtgttttcgtcgtgctatctccgtgctgaaaagccttccgtttgaggtacgtagcctgaaagacacggaaggattgccctggatcagtgatgaagtcaaagggattatggaagaaatcatcgaagtcggggagtcgcgtgaagtgcaggccgtgctcaatgatgagtggtatcaaagcttccacgcatttacgcgtgtctttggagtgggggtaggcacagcagacaagtggtaccagatgggtctgcgcaccctggaggatgttcgttccagcaagaccctgaagttgaccacgtgggcgaaagtaggtctgacgtattatgaagatcttgctcgcggcgttacccgtgcggaagctgacgcgatttggctgctggttcaggatgcagtcgcaactttcgacccggatgcgatcgtggagattgtcggtggacagcgtcgtgggaaacctcagtctcacgacgttgatctgcttatcagttctccgggagctgaaaaagagcaagaagaccaactcctgcagaaagtgatgaatctgtggaagaaacaagggttgttgctgtgtggtaaagtggtgtggagtcagtgggaatgggggggtctgccgtccggtaaggctgatgagggtgacggggaggcatcgtgctttctgatcctcaaactttatgatcatctggtgcgtaaaagtaaacataatatgccgactggttcgaacatgggcgagtccaaaccgtggaaagcaattaaagtagatctgctgcgttgcccccgcggcagttttgcgtttgcgatgttgcagtggaccggaagccgcatgttccgtcgcgatctgcgcgattacgcccgcgaagagaagaacatgatgctggacaatcatagcctgtatgacatgactcgtggtatccaactccctgctaaatcggaagaggaaattttcgaacatctggggcttgaatacctggaaccgttctatcgtaacgca

SEQ ID NO: 5332 - protein, 529 aa, synthetic construct
  REGION 1..529: note = Variant of terminal deoxynucleotidyltransferase
MHHHHHHGGSGSHGIRTIDSDFGKKQQKKGDNHDSSATYEIKFHEFVLFILEEKMGATRRTFLTDLARKKGFRVENELTDEVTHIVAENLSRSEVLAWLKEHKMEKTKQFELLDISWLIESMKVGKPVDTKGKYQLAESVEVSANPDPTEGRVNELPPTMKTVSPYACQRRTTLNNRNQRFTDSLEILRENYVFKGNDDTALCFRRAISVLKSLPFEVRSLKDTEGLPWISDEVKGIMEEIIEVGESREVQAVLNDEWYQSFHAFTRVFGVGVGTADKWYQMGLRTLEDVRSSKTLKLTTWAKVGLTYYEDLARGVTRAEADAIWLLVQDAVATFDPDAIVEIVGGQRRGKPQSHDVDLLISSPGAEKEQEDQLLQKVMNLWKKQGLLLCGKVVWSQWEWGGLPSGKADEGDGEASCFLILKLYDHLVRKSKHNMPTGSNMGESKPWKAIKVDLLRCPRGSFAFAMLQWTGSRMFRRDLRDYAREEKNMMLDNHSLYDMTRGIQLPAKSEEEIFEHLGLEYLEPFYRNA

SEQ ID NO: 5333 - DNA, 1587 bp, synthetic construct
  misc_feature 1..1587: note = Variant of terminal deoxynucleotidyltransferase
  source 1..1587: mol_type = other DNA
atgcaccatcatcatcatcatggcggtagcggcagccacggcattcgtaccatcgattcggacttcgggaagaaacagcagaaaaaaggcgataaccacgatagttccgccacttatgaaatcaaatttcacgagtttgtgctgttcattctcgaagaaaaaatgggtgcgacgcgtcgtacttttctgacagatttagcccgcaagaaagggttccgcgtcgagaatgaactgaccgacgaagttacccacatcgtggcagaaaatctgtcacgctctgaagtattggcttggctgaaagaacacaagatggagaagaccaagcaattcgaactgctggatattagctggcttatcgaaagcatgaaagttggtaaaccggtggacaccaaggggaaataccagttggcggaatcggttgaggtgagtgcgaacccagatccgacagaaggtcgtgtaaacgagctgcctcctactatgaaaaccgtttctccgtatgcgtgtcaacgccgcaccaccctgaacaaccgtaatcaacgttttacggactcgctggagattcttcgcgagaattacgtgtttaaaggcaacgacgatactgcgctggaatttcgtcgtgctatctccgtgctgaaaagccttccgtttgaggtacgtagcctgaaagacacggaaggattgccctggatcagtgatgaagtcaaagggattatggaagaaatcatcgaagtcggggagtcgcgtgaagtgcaggccgtgctcaatgatgagtggtatcaaagcttccacgcatttacgcgtgtctttggagtgggggtaggcacagcagacaagtggtaccagatgggtctgcgcaccctggaggatgttcgttccagcaagaccctgaagttgaccacgtgggcgaaaattggtctgacgtattatgaagatcttgctcgcggcgttacccgtgcggaagctgacgcgatttggctgctggttcaggatgcagtcgcaactttcgacccggatgcgatcgtggagattgtcggtggacagcgtcgtgggaaacctcagtctcacgacgttgatctgcttatcagttctccgggagctgaaaaagagcaagaagaccaactcctgcagaaagtgatgaatctgtggaagaaacaagggttgttgctgtgtggtaaagtggtgtggagtcagtgggaatgggggggtctgccgtccggtaaggctgatgagggtgacggggaggcatcgtgctttctgatcctcaaactttatgatcatctggtgcgtaaaagtaaacataatatgccgactggttcgaacatgggcgagtccaaaccgtggaaagcaattaaagtagatctgctgcgttgcccccgcggcagttttgcgtttgcgatgttgcagtggaccggaagccgcatgttccgtcgcgatctgcgcgattacgcccgcgaagagaagaacatgatgctggacaatcatagcctgtatgacatgactcgtggtatccaactccctgctaaatcggaagaggaaattttcgaacatctggggcttgaatacctggaaccgttctatcgtaacgca

SEQ ID NO: 5334 - protein, 529 aa, synthetic construct
  REGION 1..529: note = Variant of terminal deoxynucleotidyltransferase
MHHHHHHGGSGSHGIRTIDSDFGKKQQKKGDNHDSSATYEIKFHEFVLFILEEKMGATRRTFLTDLARKKGFRVENELTDEVTHIVAENLSRSEVLAWLKEHKMEKTKQFELLDISWLIESMKVGKPVDTKGKYQLAESVEVSANPDPTEGRVNELPPTMKTVSPYACQRRTTLNNRNQRFTDSLEILRENYVFKGNDDTALEFRRAISVLKSLPFEVRSLKDTEGLPWISDEVKGIMEEIIEVGESREVQAVLNDEWYQSFHAFTRVFGVGVGTADKWYQMGLRTLEDVRSSKTLKLTTWAKIGLTYYEDLARGVTRAEADAIWLLVQDAVATFDPDAIVEIVGGQRRGKPQSHDVDLLISSPGAEKEQEDQLLQKVMNLWKKQGLLLCGKVVWSQWEWGGLPSGKADEGDGEASCFLILKLYDHLVRKSKHNMPTGSNMGESKPWKAIKVDLLRCPRGSFAFAMLQWTGSRMFRRDLRDYAREEKNMMLDNHSLYDMTRGIQLPAKSEEEIFEHLGLEYLEPFYRNA

SEQ ID NO: 5335 - DNA, 1587 bp, synthetic construct
  misc_feature 1..1587: note = Variant of terminal deoxynucleotidyltransferase
  source 1..1587: mol_type = other DNA
atgcaccatcatcatcatcatggcggtagcggcagccacggcattcgtaccatcgattcggacttcgggaagaaacagcagaaaaaaggcgataaccacgatagttccgccacttatgaaatcaaatttcacgagtttgtgctgttcattctcgaagaaaaaatgggtgcgacgcgtcgtacttttctgacagatttagcccgcaagaaagggttccgcgtcgagaatgaactgaccgacgaagttacccacatcgtggcagaaaatctgtcacgctctgaagtattggcttggctgaaagaacacaagatggagaagaccaagcaattcgaactgctggatattagctggcttatcgaaagcatgaaagttggtaaaccggtggacaccaaggggaaataccagttggcggaatcggttgaggtgagtgcgaacccagatccgacagaaggtcgtgtaaacgagctgcctcctactatgaaaaccgtttctccgtatgcgtgtcaacgccgcaccaccctgaacaaccgtaatcaacgttttacggactcgctggagattcttcgcgagaattacgtgtttaaaggcaacgacgatactgcgctactgtttcgtcgtgctatctccgtgctgaaaagccttccgtttgaggtacgtagcctgaaagacacggaaggattgccctggatcagtgatgaagtcaaagggattatggaagaaatcatcgaagtcggggagtcgcgtgaagtgcaggccgtgctcaatgatgagtggtatcaaagcttccacgcatttacgcgtgtctttggagtgggggtaggcacagcagacaagtggtaccagatgggtctgcgcaccctggaggatgttcgttccagcaagaccctgaagttgaccacgtgggcgaaagtaggtctgacgtattatgaagatcttgctcgcggcgttacccgtgcggaagctgacgcgatttggctgctggttcaggatgcagtcgcaactttcgacccggatgcgatcgtggagattgtcggtggacagcgtcgtgggaaacctcagtctcacgacgttgatctgcttatcagttctccgggagctgaaaaagagcaagaagaccaactcctgcagaaagtgatgaatctgtggaagaaacaagggttgttgctgtgtggtaaagtggtgtggagtcagtgggaatgggggggtctgccgtccggtaaggctgatgagggtgacggggaggcatcgtgctttctgatcctcaaactttatgatcatctggtgcgtaaaagtaaacataatatgccgactggttcgaacatgggcgagtccaaaccgtggaaagcaattaaagtagatctgctgcgttgcccccgcggcagttttgcgtttgcgatgttgcagtggaccggaagccgcatgttccgtcgcgatctgcgcgattacgcccgcgaagagaagaacatgatgctggacaatcatagcctgtatgacatgactcgtggtatccaactccctgctaaatcggaagaggaaattttcgaacatctggggcttgaatacctggaaccgttctatcgtaacgca

SEQ ID NO: 5336 - protein, 529 aa, synthetic construct
  REGION 1..529: note = Variant of terminal deoxynucleotidyltransferase
MHHHHHHGGSGSHGIRTIDSDFGKKQQKKGDNHDSSATYEIKFHEFVLFILEEKMGATRRTFLTDLARKKGFRVENELTDEVTHIVAENLSRSEVLAWLKEHKMEKTKQFELLDISWLIESMKVGKPVDTKGKYQLAESVEVSANPDPTEGRVNELPPTMKTVSPYACQRRTTLNNRNQRFTDSLEILRENYVFKGNDDTALLFRRAISVLKSLPFEVRSLKDTEGLPWISDEVKGIMEEIIEVGESREVQAVLNDEWYQSFHAFTRVFGVGVGTADKWYQMGLRTLEDVRSSKTLKLTTWAKVGLTYYEDLARGVTRAEADAIWLLVQDAVATFDPDAIVEIVGGQRRGKPQSHDVDLLISSPGAEKEQEDQLLQKVMNLWKKQGLLLCGKVVWSQWEWGGLPSGKADEGDGEASCFLILKLYDHLVRKSKHNMPTGSNMGESKPWKAIKVDLLRCPRGSFAFAMLQWTGSRMFRRDLRDYAREEKNMMLDNHSLYDMTRGIQLPAKSEEEIFEHLGLEYLEPFYRNA

SEQ ID NO: 5337 - DNA, 1587 bp, synthetic construct
  misc_feature 1..1587: note = Variant of terminal deoxynucleotidyltransferase
  source 1..1587: mol_type = other DNA
atgcaccatcatcatcatcatggcggtagcggcagccacggcattcgtaccatcgattcggacttcgggaagaaacagcagaaaaaaggcgataaccacgatagttccgccacttatgaaatcaaatttcacgagtttgtgctgttcattctcgaagaaaaaatgggtgcgacgcgtcgtacttttctgacagatttagcccgcaagaaagggttccgcgtcgagaatgaactgaccgacgaagttacccacatcgtggcagaaaatctgtcacgctctgaagtattggcttggctgaaagaacacaagatggagaagaccaagcaattcgaactgctggatattagctggcttatcgaaagcatgaaagttggtaaaccggtggacaccaaggggaaataccagttggcggaatcggttgaggtgagtgcgaacccagatccgacagaaggtcgtgtaaacgagctgcctcctactatgaaaaccgtttctccgtatgcgtgtcaacgccgcaccaccctgaacaaccgtaatcaacgttttacggactcgctggagattcttcgcgagaattacgtgtttaaaggcaacgacgatgaggcgctggaatttcgtcgtgctatctccgtgctgaaaagccttccgtttgaggtacgtagcctgaaagacacggaaggattgccctggatcagtgatgaagtcaaagggattatggaagaaatcatcgaagtcggggagtcgcgtgaagtgcaggccgtgctcaatgatgagtggtatcaaagcttccacgcatttacgcgtgtctttggagtgggggtaggcacagcagacaagtggtaccagatgggtctgcgcaccctggaggatgttcgttccagcaagaccctgaagttgaccacgtgggcgaaagtaggtctgacgtattatgaagatcttgctcgcggcgttacccgtgcggaagctgacgcgatttggctgctggttcaggatgcagtcgcaactttcgacccggatgcgatcgtggagattgtcggtggacagcgtcgtgggaaacctcagtctcacgacgttgatctgcttatcagttctccgggagctgaaaaagagcaagaagaccaactcctgcagaaagtgatgaatctgtggaagaaacaagggttgttgctgtgtggtaaagtggtgtggagtcagtgggaatgggggggtctgccgtccggtaaggctgatgagggtgacggggaggcatcgtgctttctgatcctcaaactttatgatcatctggtgcgtaaaagtaaacataatatgccgactggttcgaacatgggcgagtccaaaccgtggaaagcaattaaagtagatctgctgcgttgcccccgcggcagttttgcgtttgcgatgttgcagtggaccggaagccgcatgttccgtcgcgatctgcgcgattacgcccgcgaagagaagaacatgatgctggacaatcatagcctgtatgacatgactcgtggtatccaactccctgctaaatcggaagaggaaattttcgaacatctggggcttgaatacctggaaccgttctatcgtaacgca

SEQ ID NO: 5338 - protein, 529 aa, synthetic construct
  REGION 1..529: note = Variant of terminal deoxynucleotidyltransferase
MHHHHHHGGSGSHGIRTIDSDFGKKQQKKGDNHDSSATYEIKFHEFVLFILEEKMGATRRTFLTDLARKKGFRVENELTDEVTHIVAENLSRSEVLAWLKEHKMEKTKQFELLDISWLIESMKVGKPVDTKGKYQLAESVEVSANPDPTEGRVNELPPTMKTVSPYACQRRTTLNNRNQRFTDSLEILRENYVFKGNDDEALEFRRAISVLKSLPFEVRSLKDTEGLPWISDEVKGIMEEIIEVGESREVQAVLNDEWYQSFHAFTRVFGVGVGTADKWYQMGLRTLEDVRSSKTLKLTTWAKVGLTYYEDLARGVTRAEADAIWLLVQDAVATFDPDAIVEIVGGQRRGKPQSHDVDLLISSPGAEKEQEDQLLQKVMNLWKKQGLLLCGKVVWSQWEWGGLPSGKADEGDGEASCFLILKLYDHLVRKSKHNMPTGSNMGESKPWKAIKVDLLRCPRGSFAFAMLQWTGSRMFRRDLRDYAREEKNMMLDNHSLYDMTRGIQLPAKSEEEIFEHLGLEYLEPFYRNA

SEQ ID NO: 5339 - DNA, 1587 bp, synthetic construct
  misc_feature 1..1587: note = Variant of terminal deoxynucleotidyltransferase
  source 1..1587: mol_type = other DNA
atgcaccatcatcatcatcatggcggtagcggcagccacggcattcgtaccatcgattcggacttcgggaagaaacagcagaaaaaaggcgataaccacgatagttccgccacttatgaaatcaaatttcacgagtttgtgctgttcattctcgaagaaaaaatgggtgcgacgcgtcgtacttttctgacagatttagcccgcaagaaagggttccgcgtcgagaatgaactgaccgacgaagttacccacatcgtggcagaaaatctgtcacgctctgaagtattggcttggctgaaagaacacaagatggagaagaccaagcaattcgaactgctggatattagctggcttatcgaaagcatgaaagttggtaaaccggtggacaccaaggggaaataccagttggcggaatcggttgaggtgagtgcgaacccagatccgacagaaggtcgtgtaaacgagctgcctcctactatgaaaaccgtttctccgtatgcgtgtcaacgccgcaccaccctgaacaaccgtaatcaacgttttacggactcgctggagattcttcgcgagaattacgtgtttaaaggcaacgacgatactgcgctggaatttcgtcgtgctatctccgtgctgaaaagccttccgtttgaggtacgtagcctgaaagacacggaaggattgccctggatcagtgatgaagtcaaagggattatggaagaaatcatcgaagtcggggagtcgcgtgaagtgcaggccgtgctcaatgatgagtggtatcaaagcttccacgcatttacgcgtgtctttggagtgggggtaggcacagcagacaagtggtaccagatgggtctgcgcaccctggaggatgttcgttccagcaagaccctgaagttgaccacgtgggcgaaagtaggtctgacgtattatgaagatcttgctcgcggcgttacccgtgcggaagctgacgcgatttggctgctggttcaggatgcagtcgcaactttcgacccggatgcgatcgtggagattgtcggtggacagcgtcgtgggaaacctcagtctcacgacgttgatctgcttatcagttctccgggagctgaaaaagagcaagaagaccaactcctgcggaaagtgatgaatctgtggaagaaacaagggttgttgctgtgtggtaaagtggtgtggagtcagtgggaatgggggggtctgccgtccggtaaggctgatgagggtgacggggaggcatcgtgctttctgatcctcaaactttatgatcatctggtgcgtaaaagtaaacataatatgccgactggttcgaacatgggcgagtccaaaccgtggaaagcaattaaagtagatctgctgcgttgcccccgcggcagttttgcgtttgcgatgttgcagtggaccggaagccgcatgttccgtcgcgatctgcgcgattacgcccgcgaagagaagaacatgatgctggacaatcatagcctgtatgacatgactcgtggtatccaactccctgctaaatcggaagaggaaattttcgaacatctggggcttgaatacctggaaccgttctatcgtaacgca

SEQ ID NO: 5340 - protein, 529 aa, synthetic construct
  REGION 1..529: note = Variant of terminal deoxynucleotidyltransferase
MHHHHHHGGSGSHGIRTIDSDFGKKQQKKGDNHDSSATYEIKFHEFVLFILEEKMGATRRTFLTDLARKKGFRVENELTDEVTHIVAENLSRSEVLAWLKEHKMEKTKQFELLDISWLIESMKVGKPVDTKGKYQLAESVEVSANPDPTEGRVNELPPTMKTVSPYACQRRTTLNNRNQRFTDSLEILRENYVFKGNDDTALEFRRAISVLKSLPFEVRSLKDTEGLPWISDEVKGIMEEIIEVGESREVQAVLNDEWYQSFHAFTRVFGVGVGTADKWYQMGLRTLEDVRSSKTLKLTTWAKVGLTYYEDLARGVTRAEADAIWLLVQDAVATFDPDAIVEIVGGQRRGKPQSHDVDLLISSPGAEKEQEDQLLRKVMNLWKKQGLLLCGKVVWSQWEWGGLPSGKADEGDGEASCFLILKLYDHLVRKSKHNMPTGSNMGESKPWKAIKVDLLRCPRGSFAFAMLQWTGSRMFRRDLRDYAREEKNMMLDNHSLYDMTRGIQLPAKSEEEIFEHLGLEYLEPFYRNA

SEQ ID NO: 5341 - DNA, 1587 bp, synthetic construct
  misc_feature 1..1587: note = Variant of terminal deoxynucleotidyltransferase
  source 1..1587: mol_type = other DNA
atgcaccatcatcatcatcatggcggtagcggcagccacggcattcgtaccatcgattcggacttcgggaagaaacagcagaaaaaaggcgataaccacgatagttccgccacttatgaaatcaaatttcacgagtttgtgctgttcattctcgaagaaaaaatgggtgcgacgcgtcgtacttttctgacagatttagcccgcaagaaagggttccgcgtcgagaatgaactgaccgacgaagttacccacatcgtggcagaaaatctgtcacgctctgaagtattggcttggctgaaagaacacaagatggagaagaccaagcaattcgaactgctggatattagctggcttatcgaaagcatgaaagttggtaaaccggtggacaccaaggggaaataccagttggcggaatcggttgaggtgagtgcgaacccagatccgacagaaggtcgtgtaaacgagctgcctcctactatgaaaaccgtttctccgtatgcgtgtcaacgccgcaccaccctgaacaacacgaatcaacgttttacggactcgctggagattcttcgcgagaattacgtgtttaaaggcaacgacgatactgcgctggaatttcgtcgtgctatctccgtgctgaaaagccttccgtttgaggtacgtagcctgaaagacacggaaggattgccctggatcagtgatgaagtcaaagggattatggaagaaatcatcgaagtcggggagtcgcgtgaagtgcaggccgtgctcaatgatgagtggtatcaaagcttccacgcatttacgcgtgtctttggagtgggggtaggcacagcagacaagtggtaccagatgggtctgcgcaccctggaggatgttcgttccagcaagaccctgaagttgaccacgtgggcgaaagtaggtctgacgtattatgaagatcttgctcgcggcgttacccgtgcggaagctgacgcgatttggctgctggttcaggatgcagtcgcaactttcgacccggatgcgatcgtggagattgtcggtggacagcgtcgtgggaaacctcagtctcacgacgttgatctgcttatcagttctccgggagctgaaaaagagcaagaagaccaactcctgcagaaagtgatgaatctgtggaagaaacaagggttgttgctgtgtggtaaagtggtgtggagtcagtgggaatgggggggtctgccgtccggtaaggctgatgagggtgacggggaggcatcgtgctttctgatcctcaaactttatgatcatctggtgcgtaaaagtaaacataatatgccgactggttcgaacatgggcgagtccaaaccgtggaaagcaattaaagtagatctgctgcgttgcccccgcggcagttttgcgtttgcgatgttgcagtggaccggaagccgcatgttccgtcgcgatctgcgcgattacgcccgcgaagagaagaacatgatgctggacaatcatagcctgtatgacatgactcgtggtatccaactccctgctaaatcggaagaggaaattttcgaacatctggggcttgaatacctggaaccgttctatcgtaacgca

SEQ ID NO: 5342 - protein, 529 aa, synthetic construct
  REGION 1..529: note = Variant of terminal deoxynucleotidyltransferase
MHHHHHHGGSGSHGIRTIDSDFGKKQQKKGDNHDSSATYEIKFHEFVLFILEEKMGATRRTFLTDLARKKGFRVENELTDEVTHIVAENLSRSEVLAWLKEHKMEKTKQFELLDISWLIESMKVGKPVDTKGKYQLAESVEVSANPDPTEGRVNELPPTMKTVSPYACQRRTTLNNTNQRFTDSLEILRENYVFKGNDDTALEFRRAISVLKSLPFEVRSLKDTEGLPWISDEVKGIMEEIIEVGESREVQAVLNDEWYQSFHAFTRVFGVGVGTADKWYQMGLRTLEDVRSSKTLKLTTWAKVGLTYYEDLARGVTRAEADAIWLLVQDAVATFDPDAIVEIVGGQRRGKPQSHDVDLLISSPGAEKEQEDQLLQKVMNLWKKQGLLLCGKVVWSQWEWGGLPSGKADEGDGEASCFLILKLYDHLVRKSKHNMPTGSNMGESKPWKAIKVDLLRCPRGSFAFAMLQWTGSRMFRRDLRDYAREEKNMMLDNHSLYDMTRGIQLPAKSEEEIFEHLGLEYLEPFYRNA

SEQ ID NO: 5343 - DNA, 1587 bp, synthetic construct
  misc_feature 1..1587: note = Variant of terminal deoxynucleotidyltransferase
  source 1..1587: mol_type = other DNA
atgcaccatcatcatcatcatggcggtagcggcagccacggcattcgtaccatcgattcggacttcgggaagaaacagcagaaaaaaggcgataaccacgatagttccgccacttatgaaatcaaatttcacgagtttgtgctgttcattctcgaagaaaaaatgggtgcgacgcgtcgtacttttctgacagatttagcccgcaagaaagggttccgcgtcgagaatgaactgaccgacgaagttacccacatcgtggcagaaaatctgtcacgctctgaagtattggcttggctgaaagaacacaagatggagaagaccaagcaattcgaactgctggatattagctggcttatcgaaagcatgaaagttggtaaaccggtggacaccaaggggaaataccagttggcggaatcggttgaggtgagtgcgaacccagatccgacagaaggtcgtgtaaacgagctgcctcctactatgaaaaccgtttctccgtatgcgtgtcaacgccgcaccaccctgaacaaccgtaatcaacgttttacggactcgctggagattcttcgcgagaattactgttttaaaggcaacgacgatactgcgctggaatttcgtcgtgctatctccgtgctgaaaagccttccgtttgaggtacgtagcctgaaagacacggaaggattgccctggatcagtgatgaagtcaaagggattatggaagaaatcatcgaagtcggggagtcgcgtgaagtgcaggccgtgctcaatgatgagtggtatcaaagcttccacgcatttacgcgtgtctttggagtgggggtaggcacagcagacaagtggtaccagatgggtctgcgcaccctggaggatgttcgttccagcaagaccctgaagttgaccacgtgggcgaaagtaggtctgacgtattatgaagatcttgctcgcggcgttacccgtgcggaagctgacgcgatttggctgctggttcaggatgcagtcgcaactttcgacccggatgcgatcgtggagattgtcggtggacagcgtcgtgggaaacctcagtctcacgacgttgatctgcttatcagttctccgggagctgaaaaagagcaagaagaccaactcctgcagaaagtgatgaatctgtggaagaaacaagggttgttgctgtgtggtaaagtggtgtggagtcagtgggaatgggggggtctgccgtccggtaaggctgatgagggtgacggggaggcatcgtgctttctgatcctcaaactttatgatcatctggtgcgtaaaagtaaacataatatgccgactggttcgaacatgggcgagtccaaaccgtggaaagcaattaaagtagatctgctgcgttgcccccgcggcagttttgcgtttgcgatgttgcagtggaccggaagccgcatgttccgtcgcgatctgcgcgattacgcccgcgaagagaagaacatgatgctggacaatcatagcctgtatgacatgactcgtggtatccaactccctgctaaatcggaagaggaaattttcgaacatctggggcttgaatacctggaaccgttctatcgtaacgca

SEQ ID NO: 5344 - protein, 529 aa, synthetic construct
  REGION 1..529: note = Variant of terminal deoxynucleotidyltransferase
MHHHHHHGGSGSHGIRTIDSDFGKKQQKKGDNHDSSATYEIKFHEFVLFILEEKMGATRRTFLTDLARKKGFRVENELTDEVTHIVAENLSRSEVLAWLKEHKMEKTKQFELLDISWLIESMKVGKPVDTKGKYQLAESVEVSANPDPTEGRVNELPPTMKTVSPYACQRRTTLNNRNQRFTDSLEILRENYCFKGNDDTALEFRRAISVLKSLPFEVRSLKDTEGLPWISDEVKGIMEEIIEVGESREVQAVLNDEWYQSFHAFTRVFGVGVGTADKWYQMGLRTLEDVRSSKTLKLTTWAKVGLTYYEDLARGVTRAEADAIWLLVQDAVATFDPDAIVEIVGGQRRGKPQSHDVDLLISSPGAEKEQEDQLLQKVMNLWKKQGLLLCGKVVWSQWEWGGLPSGKADEGDGEASCFLILKLYDHLVRKSKHNMPTGSNMGESKPWKAIKVDLLRCPRGSFAFAMLQWTGSRMFRRDLRDYAREEKNMMLDNHSLYDMTRGIQLPAKSEEEIFEHLGLEYLEPFYRNA

SEQ ID NO: 5345 - DNA, 1587 bp, synthetic construct
  misc_feature 1..1587: note = Variant of terminal deoxynucleotidyltransferase
  source 1..1587: mol_type = other DNA
atgcaccatcatcatcatcatggcggtagcggcagccacggcattcgtaccatcgattcggacttcgggaagaaacagcagaaaaaaggcgataaccacgatagttccgccacttatgaaatcaaatttcacgagtttgtgctgttcattctcgaagaaaaaatgggtgcgacgcgtcgtacttttctgacagatttagcccgcaagaaagggttccgcgtcgagaatgaactgaccgacgaagttacccacatcgtggcagaaaatctgtcacgctctgaagtattggcttggctgaaagaacacaagatggagaagaccaagcaattcgaactgctggatattagctggcttatcgaaagcatgaaagttggtaaaccggtggacaccaaggggaaataccagttggcggaatcggttgaggtgagtgcgaacccagatccgacagaaggtcgtgtaaacgagctgcctcctactatgaaaaccgtttctccgtatgcgtgtcaacgccgcaccaccctgaacaaccgtaatcaacgttttacggactcgctggagattcttcgcgagaattacgtgtttaaaggcaacgacgatcaggcgctggaatttcgtcgtgctatctccgtgctgaaaagccttccgtttgaggtacgtagcctgaaagacacggaaggattgccctggatcagtgatgaagtcaaagggattatggaagaaatcatcgaagtcggggagtcgcgtgaagtgcaggccgtgctcaatgatgagtggtatcaaagcttccacgcatttacgcgtgtctttggagtgggggtaggcacagcagacaagtggtaccagatgggtctgcgcaccctggaggatgttcgttccagcaagaccctgaagttgaccacgtgggcgaaagtaggtctgacgtattatgaagatcttgctcgcggcgttacccgtgcggaagctgacgcgatttggctgctggttcaggatgcagtcgcaactttcgacccggatgcgatcgtggagattgtcggtggacagcgtcgtgggaaacctcagtctcacgacgttgatctgcttatcagttctccgggagctgaaaaagagcaagaagaccaactcctgcagaaagtgatgaatctgtggaagaaacaagggttgttgctgtgtggtaaagtggtgtggagtcagtgggaatgggggggtctgccgtccggtaaggctgatgagggtgacggggaggcatcgtgctttctgatcctcaaactttatgatcatctggtgcgtaaaagtaaacataatatgccgactggttcgaacatgggcgagtccaaaccgtggaaagcaattaaagtagatctgctgcgttgcccccgcggcagttttgcgtttgcgatgttgcagtggaccggaagccgcatgttccgtcgcgatctgcgcgattacgcccgcgaagagaagaacatgatgctggacaatcatagcctgtatgacatgactcgtggtatccaactccctgctaaatcggaagaggaaattttcgaacatctggggcttgaatacctggaaccgttctatcgtaacgca

SEQ ID NO: 5346 - protein, 529 aa, synthetic construct
  REGION 1..529: note = Variant of terminal deoxynucleotidyltransferase
MHHHHHHGGSGSHGIRTIDSDFGKKQQKKGDNHDSSATYEIKFHEFVLFILEEKMGATRRTFLTDLARKKGFRVENELTDEVTHIVAENLSRSEVLAWLKEHKMEKTKQFELLDISWLIESMKVGKPVDTKGKYQLAESVEVSANPDPTEGRVNELPPTMKTVSPYACQRRTTLNNRNQRFTDSLEILRENYVFKGNDDQALEFRRAISVLKSLPFEVRSLKDTEGLPWISDEVKGIMEEIIEVGESREVQAVLNDEWYQSFHAFTRVFGVGVGTADKWYQMGLRTLEDVRSSKTLKLTTWAKVGLTYYEDLARGVTRAEADAIWLLVQDAVATFDPDAIVEIVGGQRRGKPQSHDVDLLISSPGAEKEQEDQLLQKVMNLWKKQGLLLCGKVVWSQWEWGGLPSGKADEGDGEASCFLILKLYDHLVRKSKHNMPTGSNMGESKPWKAIKVDLLRCPRGSFAFAMLQWTGSRMFRRDLRDYAREEKNMMLDNHSLYDMTRGIQLPAKSEEEIFEHLGLEYLEPFYRNA

SEQ ID NO: 5347 - DNA, 1587 bp, synthetic construct
  misc_feature 1..1587: note = Variant of terminal deoxynucleotidyltransferase
  source 1..1587: mol_type = other DNA
atgcaccatcatcatcatcatggcggtagcggcagccacggcattcgtaccatcgattcggacttcgggaagaaacagcagaaaaaaggcgataaccacgatagttccgccacttatgaaatcaaatttcacgagtttgtgctgttcattctcgaagaaaaaatgggtgcgacgcgtcgtacttttctgacagatttagcccgcaagaaagggttccgcgtcgagaatgaactgaccgacgaagttacccacatcgtggcagaaaatctgtcacgctctgaagtattggcttggctgaaagaacacaagatggagaagaccaagcaattcgaactgctggatattagctggcttatcgaaagcatgaaagttggtaaaccggtggacaccaaggggaaataccagttggcggaatcggttgaggtgagtgcgaacccagatccgacagaaggtcgtgtaaacgagctgcctcctactatgaaaaccgtttctccgtatgcgtgtcaacgccgcaccaccctgaacaaccgtaatcaacgttttacggactcgctggagattcttcgcgagaattacgtgtttaaaggcaacgacgatactgcgctggaatttcgtcgtgctatctccgtgctgaaaagccttccgtttgaggtacgtagcctgaaagacacggaaggattgccctggatcagtgatgaagtcaaagggattatggaagaaatcatcgaagtcggggagtcgcgtgaagtgcaggccgtgctcaatgatgagtggtatcaaagcttccacgcatttacgcgtgtctttggagtgggggtaggcacagcagacaagtggtaccagatgggtctgcgcaccctggaggatgttcgttccagcaagaccctgaagttgaccacgtgggcgaaagtaggtctgacgtattatgaagatcttgctcgcggcgttacccgtgcggaagctgacgcgatttggctgctggttttggatgcagtcgcaactttcgacccggatgcgatcgtggagattgtcggtggacagcgtcgtgggaaacctcagtctcacgacgttgatctgcttatcagttctccgggagctgaaaaagagcaagaagaccaactcctgcagaaagtgatgaatctgtggaagaaacaagggttgttgctgtgtggtaaagtggtgtggagtcagtgggaatgggggggtctgccgtccggtaaggctgatgagggtgacggggaggcatcgtgctttctgatcctcaaactttatgatcatctggtgcgtaaaagtaaacataatatgccgactggttcgaacatgggcgagtccaaaccgtggaaagcaattaaagtagatctgctgcgttgcccccgcggcagttttgcgtttgcgatgttgcagtggaccggaagccgcatgttccgtcgcgatctgcgcgattacgcccgcgaagagaagaacatgatgctggacaatcatagcctgtatgacatgactcgtggtatccaactccctgctaaatcggaagaggaaattttcgaacatctggggcttgaatacctggaaccgttctatcgtaacgca

SEQ ID NO: 5348 - protein, 529 aa, synthetic construct
  REGION 1..529: note = Variant of terminal deoxynucleotidyltransferase
MHHHHHHGGSGSHGIRTIDSDFGKKQQKKGDNHDSSATYEIKFHEFVLFILEEKMGATRRTFLTDLARKKGFRVENELTDEVTHIVAENLSRSEVLAWLKEHKMEKTKQFELLDISWLIESMKVGKPVDTKGKYQLAESVEVSANPDPTEGRVNELPPTMKTVSPYACQRRTTLNNRNQRFTDSLEILRENYVFKGNDDTALEFRRAISVLKSLPFEVRSLKDTEGLPWISDEVKGIMEEIIEVGESREVQAVLNDEWYQSFHAFTRVFGVGVGTADKWYQMGLRTLEDVRSSKTLKLTTWAKVGLTYYEDLARGVTRAEADAIWLLVLDAVATFDPDAIVEIVGGQRRGKPQSHDVDLLISSPGAEKEQEDQLLQKVMNLWKKQGLLLCGKVVWSQWEWGGLPSGKADEGDGEASCFLILKLYDHLVRKSKHNMPTGSNMGESKPWKAIKVDLLRCPRGSFAFAMLQWTGSRMFRRDLRDYAREEKNMMLDNHSLYDMTRGIQLPAKSEEEIFEHLGLEYLEPFYRNA

SEQ ID NO: 5349 - DNA, 1587 bp, synthetic construct
  misc_feature 1..1587: note = Variant of terminal deoxynucleotidyltransferase
  source 1..1587: mol_type = other DNA
atgcaccatcatcatcatcatggcggtagcggcagccacggcattcgtaccatcgattcggacttcgggaagaaacagcagaaaaaaggcgataaccacgatagttccgccacttatgaaatcaaatttcacgagtttgtgctgttcattctcgaagaaaaaatgggtgcgacgcgtcgtacttttctgacagatttagcccgcaagaaagggttccgcgtcgagaatgaactgaccgacgaagttacccacatcgtggcagaaaatctgtcacgctctgaagtattggcttggctgaaagaacacaagatggagaagaccaagcaattcgaactgctggatattagctggcttatcgaaagcatgaaagttggtaaaccggtggacaccaaggggaaataccagttggcggaatcggttgaggtgagtgcgaacccagatccgacagaaggtcgtgtaaacgagctgcctcctactatgaaaaccgtttctccgtatgcgtgtcaacgccgcaccaccctgaacaaccgtaatcaacgttttacggactcgctggagattcttcgcgagaattacgtgtttaaaggcaacgacgatactgcgctggaatttcgtcgtgctatctccgtgctgaaaagccttccgtttgaggtacgtagcctgaaagacacggaaggattgccctggatcagtgatgaagtcaaagggattatggaagaaatcatcgaagtcggggagtcgcgtgaagtgcaggccgtgctcaatgatgagtggtatcaaagcttccacgcatttacgcgtgtctttggagtgggggtaggcacagcagacaagtggtaccagatgggtctgcgcaccctggaggatgttcgttccagcaagaccctgaagttgaccacgtgggcgaaagtaggtctgacgtattatgaagatcttgctcgcggcgttacccgtgcggaagctgacgcgatttggctgctggttcaggatgcagtcgcaactttcgacccggatgcgatcgtggagattgtcggtggacagcgtcgtgggaaacctcagtctcacgacgttgatctgcttatcagttctccgggagctgaaaaagagcaagaagaccaactcctgcagaaagtgatgaatctgtggaagaaacaagggttgttgctgtgtggtaaagtgtcttggagtcagtgggaatgggggggtctgccgtccggtaaggctgatgagggtgacggggaggcatcgtgctttctgatcctcaaactttatgatcatctggtgcgtaaaagtaaacataatatgccgactggttcgaacatgggcgagtccaaaccgtggaaagcaattaaagtagatctgctgcgttgcccccgcggcagttttgcgtttgcgatgttgcagtggaccggaagccgcatgttccgtcgcgatctgcgcgattacgcccgcgaagagaagaacatgatgctggacaatcatagcctgtatgacatgactcgtggtatccaactccctgctaaatcggaagaggaaattttcgaacatctggggcttgaatacctggaaccgttctatcgtaacgca

SEQ ID NO: 5350 - protein, 529 aa, synthetic construct
  REGION 1..529: note = Variant of terminal deoxynucleotidyltransferase
MHHHHHHGGSGSHGIRTIDSDFGKKQQKKGDNHDSSATYEIKFHEFVLFILEEKMGATRRTFLTDLARKKGFRVENELTDEVTHIVAENLSRSEVLAWLKEHKMEKTKQFELLDISWLIESMKVGKPVDTKGKYQLAESVEVSANPDPTEGRVNELPPTMKTVSPYACQRRTTLNNRNQRFTDSLEILRENYVFKGNDDTALEFRRAISVLKSLPFEVRSLKDTEGLPWISDEVKGIMEEIIEVGESREVQAVLNDEWYQSFHAFTRVFGVGVGTADKWYQMGLRTLEDVRSSKTLKLTTWAKVGLTYYEDLARGVTRAEADAIWLLVQDAVATFDPDAIVEIVGGQRRGKPQSHDVDLLISSPGAEKEQEDQLLQKVMNLWKKQGLLLCGKVSWSQWEWGGLPSGKADEGDGEASCFLILKLYDHLVRKSKHNMPTGSNMGESKPWKAIKVDLLRCPRGSFAFAMLQWTGSRMFRRDLRDYAREEKNMMLDNHSLYDMTRGIQLPAKSEEEIFEHLGLEYLEPFYRNA

SEQ ID NO: 5351 - DNA, 1587 bp, synthetic construct
  misc_feature 1..1587: note = Variant of terminal deoxynucleotidyltransferase
  source 1..1587: mol_type = other DNA
atgcaccatcatcatcatcatggcggtagcggcagccacggcattcgtaccatcgattcggacttcgggaagaaacagcagaaaaaaggcgataaccacgatagttccgccacttatgaaatcaaatttcacgagtttgtgctgttcattctcgaagaaaaaatgggtgcgacgcgtcgtacttttctgacagatttagcccgcaagaaagggttccgcgtcgagaatgaactgaccgacgaagttacccacatcgtggcagaaaatctgtcacgctctgaagtattggcttggctgaaagaacacaagatggagaagaccaagcaattcgaactgctggatattagctggcttatcgaaagcatgaaagttggtaaaccggtggacaccaaggggaaataccagttggcggaatcggttgaggtgagtgcgaacccagatccgacagaaggtcgtgtaaacgagctgcctcctactatgaaaaccgtttctccgtatgcgtgtcaacgccgcaccaccctgaacaaccgtaatcaacgttttacggactcgctggagattcttcgcgagaattacgtgtttaaaggcaacgacgatactgcgctggaatttcgtcgtgctatctccgtgctgaaaagccttccgtttgaggtacgtagcctgaaagacacggaaggattgccctggatcagtgatgaagtcaaagggattatggaagaaatcatcgaagtcggggagtcgcgtgaagtgcaggccgtgctcaatgatgagtggtatcaaagcttccacgcatttacgcgtgtctttggagtgggggtaggcacagcagacaagtggtaccagatgggtctgcgcaccctggaggatgttcgttccagcaagaccctgaagttgaccacgtgggcgaaagtaggtctgacgtattatgaagatcttgctcgcggcgttacccgtgcggaagctgacgcgatttggctgctggttcaggatgcagtcgcaactttcgacccggatgcgatcgtggagattgtcggtggacagcgtcgtgggaaacctcagtctcacgacgttgatctgcttatcagttctccgggagctgaaaaagagcaagaagaccaactcctgcagagggtgatgaatctgtggaagaaacaagggttgttgctgtgtggtaaagtggtgtggagtcagtgggaatgggggggtctgccgtccggtaaggctgatgagggtgacggggaggcatcgtgctttctgatcctcaaactttatgatcatctggtgcgtaaaagtaaacataatatgccgactggttcgaacatgggcgagtccaaaccgtggaaagcaattaaagtagatctgctgcgttgcccccgcggcagttttgcgtttgcgatgttgcagtggaccggaagccgcatgttccgtcgcgatctgcgcgattacgcccgcgaagagaagaacatgatgctggacaatcatagcctgtatgacatgactcgtggtatccaactccctgctaaatcggaagaggaaattttcgaacatctggggcttgaatacctggaaccgttctatcgtaacgca

SEQ ID NO: 5352 - protein, 529 aa, synthetic construct
  REGION 1..529: note = Variant of terminal deoxynucleotidyltransferase
MHHHHHHGGSGSHGIRTIDSDFGKKQQKKGDNHDSSATYEIKFHEFVLFILEEKMGATRRTFLTDLARKKGFRVENELTDEVTHIVAENLSRSEVLAWLKEHKMEKTKQFELLDISWLIESMKVGKPVDTKGKYQLAESVEVSANPDPTEGRVNELPPTMKTVSPYACQRRTTLNNRNQRFTDSLEILRENYVFKGNDDTALEFRRAISVLKSLPFEVRSLKDTEGLPWISDEVKGIMEEIIEVGESREVQAVLNDEWYQSFHAFTRVFGVGVGTADKWYQMGLRTLEDVRSSKTLKLTTWAKVGLTYYEDLARGVTRAEADAIWLLVQDAVATFDPDAIVEIVGGQRRGKPQSHDVDLLISSPGAEKEQEDQLLQRVMNLWKKQGLLLCGKVVWSQWEWGGLPSGKADEGDGEASCFLILKLYDHLVRKSKHNMPTGSNMGESKPWKAIKVDLLRCPRGSFAFAMLQWTGSRMFRRDLRDYAREEKNMMLDNHSLYDMTRGIQLPAKSEEEIFEHLGLEYLEPFYRNA

SEQ ID NO: 5353 - DNA, 1587 bp, synthetic construct
  misc_feature 1..1587: note = Variant of terminal deoxynucleotidyltransferase
  source 1..1587: mol_type = other DNA
atgcaccatcatcatcatcatggcggtagcggcagccacggcattcgtaccatcgattcggacttcgggaagaaacagcagaaaaaaggcgataaccacgatagttccgccacttatgaaatcaaatttcacgagtttgtgctgttcattctcgaagaaaaaatgggtgcgacgcgtcgtacttttctgacagatttagcccgcaagaaagggttccgcgtcgagaatgaactgaccgacgaagttacccacatcgtggcagaaaatctgtcacgctctgaagtattggcttggctgaaagaacacaagatggagaagaccaagcaattcgaactgctggatattagctggcttatcgaaagcatgaaagttggtaaaccggtggacaccaaggggaaataccagttggcggaatcggttgaggtgagtgcgaacccagatccgacagaaggtcgtgtaaacgagctgcctcctactatgaaaaccgtttctccgtatgcgtgtcaacgccgcaccaccctgaacaaccgtaatcaacgttttacggactcgctggagattcttcgcgagaattacgtgtttaaaggcaacgacgatactgcgctggaatttcgtcgtgctatctccgtgctgaaaagccttccgtttgaggtacgtagcctgaaagacacggaaggattgccctggatcagtgatgaagtcaaagggattatggaagaaatcatcgaagtcggggagtcgcgtgaagtgcaggccgtgctcaatgatgagtggtatcaaagcttccacgcatttacgcgtgtctttggagtgggggtaggcacagcagacaagtggtaccagatgggtctgcgcaccctggaggatgttcgttccagcaagaccctgaagttgaccacgtgggcgaaagtaggtctgacgtattatgaagatcttgctcgcggcgttacccgtgcggaagctgacgcgatttggcgtctggttcaggatgcagtcgcaactttcgacccggatgcgatcgtggagattgtcggtggacagcgtcgtgggaaacctcagtctcacgacgttgatctgcttatcagttctccgggagctgaaaaagagcaagaagaccaactcctgcagaaagtgatgaatctgtggaagaaacaagggttgttgctgtgtggtaaagtggtgtggagtcagtgggaatgggggggtctgccgtccggtaaggctgatgagggtgacggggaggcatcgtgctttctgatcctcaaactttatgatcatctggtgcgtaaaagtaaacataatatgccgactggttcgaacatgggcgagtccaaaccgtggaaagcaattaaagtagatctgctgcgttgcccccgcggcagttttgcgtttgcgatgttgcagtggaccggaagccgcatgttccgtcgcgatctgcgcgattacgcccgcgaagagaagaacatgatgctggacaatcatagcctgtatgacatgactcgtggtatccaactccctgctaaatcggaagaggaaattttcgaacatctggggcttgaatacctggaaccgttctatcgtaacgca

SEQ ID NO: 5354 - protein, 529 aa, synthetic construct
  REGION 1..529: note = Variant of terminal deoxynucleotidyltransferase
MHHHHHHGGSGSHGIRTIDSDFGKKQQKKGDNHDSSATYEIKFHEFVLFILEEKMGATRRTFLTDLARKKGFRVENELTDEVTHIVAENLSRSEVLAWLKEHKMEKTKQFELLDISWLIESMKVGKPVDTKGKYQLAESVEVSANPDPTEGRVNELPPTMKTVSPYACQRRTTLNNRNQRFTDSLEILRENYVFKGNDDTALEFRRAISVLKSLPFEVRSLKDTEGLPWISDEVKGIMEEIIEVGESREVQAVLNDEWYQSFHAFTRVFGVGVGTADKWYQMGLRTLEDVRSSKTLKLTTWAKVGLTYYEDLARGVTRAEADAIWRLVQDAVATFDPDAIVEIVGGQRRGKPQSHDVDLLISSPGAEKEQEDQLLQKVMNLWKKQGLLLCGKVVWSQWEWGGLPSGKADEGDGEASCFLILKLYDHLVRKSKHNMPTGSNMGESKPWKAIKVDLLRCPRGSFAFAMLQWTGSRMFRRDLRDYAREEKNMMLDNHSLYDMTRGIQLPAKSEEEIFEHLGLEYLEPFYRNA

SEQ ID NO: 5355 - DNA, 1587 bp, synthetic construct
  misc_feature 1..1587: note = Variant of terminal deoxynucleotidyltransferase
  source 1..1587: mol_type = other DNA
atgcaccatcatcatcatcatggcggtagcggcagccacggcattcgtaccatcgattcggacttcgggaagaaacagcagaaaaaaggcgataaccacgatagttccgccacttatgaaatcaaatttcacgagtttgtgctgttcattctcgaagaaaaaatgggtgcgacgcgtcgtacttttctgacagatttagcccgcaagaaagggttccgcgtcgagaatgaactgaccgacgaagttacccacatcgtggcagaaaatctgtcacgctctgaagtattggcttggctgaaagaacacaagatggagaagaccaagcaattcgaactgctggatattagctggcttatcgaaagcatgaaagttggtaaaccggtggacaccaaggggaaataccagttggcggaatcggttgaggtgagtgcgaacccagatccgacagaaggtcgtgtaaacgagctgcctcctactatgaaaaccgtttctccgtatgcgtgtcaacgccgcaccaccctgaacaaccgtaatcaacgttttacggactcgctggagattcttcgcgagaattacgtgtttaaaggcaacgacgatactgcgctgggttttcgtcgtgctatctccgtgctgaaaagccttccgtttgaggtacgtagcctgaaagacacggaaggattgccctggatcagtgatgaagtcaaagggattatggaagaaatcatcgaagtcggggagtcgcgtgaagtgcaggccgtgctcaatgatgagtggtatcaaagcttccacgcatttacgcgtgtctttggagtgggggtaggcacagcagacaagtggtaccagatgggtctgcgcaccctggaggatgttcgttccagcaagaccctgaagttgaccacgtgggcgaaagtaggtctgacgtattatgaagatcttgctcgcggcgttacccgtgcggaagctgacgcgatttggctgctggttcaggatgcagtcgcaactttcgacccggatgcgatcgtggagattgtcggtggacagcgtcgtgggaaacctcagtctcacgacgttgatctgcttatcagttctccgggagctgaaaaagagcaagaagaccaactcctgcagaaagtgatgaatctgtggaagaaacaagggttgttgctgtgtggtaaagtggtgtggagtcagtgggaatgggggggtctgccgtccggtaaggctgatgagggtgacggggaggcatcgtgctttctgatcctcaaactttatgatcatctggtgcgtaaaagtaaacataatatgccgactggttcgaacatgggcgagtccaaaccgtggaaagcaattaaagtagatctgctgcgttgcccccgcggcagttttgcgtttgcgatgttgcagtggaccggaagccgcatgttccgtcgcgatctgcgcgattacgcccgcgaagagaagaacatgatgctggacaatcatagcctgtatgacatgactcgtggtatccaactccctgctaaatcggaagaggaaattttcgaacatctggggcttgaatacctggaaccgttctatcgtaacgca

SEQ ID NO: 5356 - protein, 529 aa, synthetic construct
  REGION 1..529: note = Variant of terminal deoxynucleotidyltransferase
MHHHHHHGGSGSHGIRTIDSDFGKKQQKKGDNHDSSATYEIKFHEFVLFILEEKMGATRRTFLTDLARKKGFRVENELTDEVTHIVAENLSRSEVLAWLKEHKMEKTKQFELLDISWLIESMKVGKPVDTKGKYQLAESVEVSANPDPTEGRVNELPPTMKTVSPYACQRRTTLNNRNQRFTDSLEILRENYVFKGNDDTALGFRRAISVLKSLPFEVRSLKDTEGLPWISDEVKGIMEEIIEVGESREVQAVLNDEWYQSFHAFTRVFGVGVGTADKWYQMGLRTLEDVRSSKTLKLTTWAKVGLTYYEDLARGVTRAEADAIWLLVQDAVATFDPDAIVEIVGGQRRGKPQSHDVDLLISSPGAEKEQEDQLLQKVMNLWKKQGLLLCGKVVWSQWEWGGLPSGKADEGDGEASCFLILKLYDHLVRKSKHNMPTGSNMGESKPWKAIKVDLLRCPRGSFAFAMLQWTGSRMFRRDLRDYAREEKNMMLDNHSLYDMTRGIQLPAKSEEEIFEHLGLEYLEPFYRNA

SEQ ID NO: 5357 - DNA, 1587 bp, synthetic construct
  misc_feature 1..1587: note = Variant of terminal deoxynucleotidyltransferase
  source 1..1587: mol_type = other DNA
atgcaccatcatcatcatcatggcggtagcggcagccacggcattcgtaccatcgattcggacttcgggaagaaacagcagaaaaaaggcgataaccacgatagttccgccacttatgaaatcaaatttcacgagtttgtgctgttcattctcgaagaaaaaatgggtgcgacgcgtcgtacttttctgacagatttagcccgcaagaaagggttccgcgtcgagaatgaactgaccgacgaagttacccacatcgtggcagaaaatctgtcacgctctgaagtattggcttggctgaaagaacacaagatggagaagaccaagcaattcgaactgctggatattagctggcttatcgaaagcatgaaagttggtaaaccggtggacaccaaggggaaataccagttggcggaatcggttgaggtgagtgcgaacccagatccgacagaaggtcgtgtaaacgagctgcctcctactatgaaaaccgtttctccgtatgcgtgtcaacgccgcaccaccctgaacaaccgtaatcaacgttttacggaccatctggagattcttcgcgagaattacgtgtttaaaggcaacgacgatactgcgctggaatttcgtcgtgctatctccgtgctgaaaagccttccgtttgaggtacgtagcctgaaagacacggaaggattgccctggatcagtgatgaagtcaaagggattatggaagaaatcatcgaagtcggggagtcgcgtgaagtgcaggccgtgctcaatgatgagtggtatcaaagcttccacgcatttacgcgtgtctttggagtgggggtaggcacagcagacaagtggtaccagatgggtctgcgcaccctggaggatgttcgttccagcaagaccctgaagttgaccacgtgggcgaaagtaggtctgacgtattatgaagatcttgctcgcggcgttacccgtgcggaagctgacgcgatttggctgctggttcaggatgcagtcgcaactttcgacccggatgcgatcgtggagattgtcggtggacagcgtcgtgggaaacctcagtctcacgacgttgatctgcttatcagttctccgggagctgaaaaagagcaagaagaccaactcctgcagaaagtgatgaatctgtggaagaaacaagggttgttgctgtgtggtaaagtggtgtggagtcagtgggaatgggggggtctgccgtccggtaaggctgatgagggtgacggggaggcatcgtgctttctgatcctcaaactttatgatcatctggtgcgtaaaagtaaacataatatgccgactggttcgaacatgggcgagtccaaaccgtggaaagcaattaaagtagatctgctgcgttgcccccgcggcagttttgcgtttgcgatgttgcagtggaccggaagccgcatgttccgtcgcgatctgcgcgattacgcccgcgaagagaagaacatgatgctggacaatcatagcctgtatgacatgactcgtggtatccaactccctgctaaatcggaagaggaaattttcgaacatctggggcttgaatacctggaaccgttctatcgtaacgca

SEQ ID NO: 5358 - protein, 529 aa, synthetic construct
  REGION 1..529: note = Variant of terminal deoxynucleotidyltransferase
MHHHHHHGGSGSHGIRTIDSDFGKKQQKKGDNHDSSATYEIKFHEFVLFILEEKMGATRRTFLTDLARKKGFRVENELTDEVTHIVAENLSRSEVLAWLKEHKMEKTKQFELLDISWLIESMKVGKPVDTKGKYQLAESVEVSANPDPTEGRVNELPPTMKTVSPYACQRRTTLNNRNQRFTDHLEILRENYVFKGNDDTALEFRRAISVLKSLPFEVRSLKDTEGLPWISDEVKGIMEEIIEVGESREVQAVLNDEWYQSFHAFTRVFGVGVGTADKWYQMGLRTLEDVRSSKTLKLTTWAKVGLTYYEDLARGVTRAEADAIWLLVQDAVATFDPDAIVEIVGGQRRGKPQSHDVDLLISSPGAEKEQEDQLLQKVMNLWKKQGLLLCGKVVWSQWEWGGLPSGKADEGDGEASCFLILKLYDHLVRKSKHNMPTGSNMGESKPWKAIKVDLLRCPRGSFAFAMLQWTGSRMFRRDLRDYAREEKNMMLDNHSLYDMTRGIQLPAKSEEEIFEHLGLEYLEPFYRNA

SEQ ID NO: 5359 - DNA, 1587 bp, synthetic construct
  misc_feature 1..1587: note = Variant of terminal deoxynucleotidyltransferase
  source 1..1587: mol_type = other DNA
atgcaccatcatcatcatcatggcggtagcggcagccacggcattcgtaccatcgattcggacttcgggaagaaacagcagaaaaaaggcgataaccacgatagttccgccacttatgaaatcaaatttcacgagtttgtgctgttcattctcgaagaaaaaatgggtgcgacgcgtcgtacttttctgacagatttagcccgcaagaaagggttccgcgtcgagaatgaactgaccgacgaagttacccacatcgtggcagaaaatctgtcacgctctgaagtattggcttggctgaaagaacacaagatggagaagaccaagcaattcgaactgctggatattagctggcttatcgaaagcatgaaagttggtaaaccggtggacaccaaggggaaataccagttggcggaatcggttgaggtgagtgcgaacccagatccgacagaaggtcgtgtaaacgagctgcctcctactatgaaaaccgtttctccgtatgcgtgtgagcgccgcaccaccctgaacaaccgtaatcaacgttttacggactcgctggagattcttcgcgagaattacgtgtttaaaggcaacgacgatactgcgctggaatttcgtcgtgctatctccgtgctgaaaagccttccgtttgaggtacgtagcctgaaagacacggaaggattgccctggatcagtgatgaagtcaaagggattatggaagaaatcatcgaagtcggggagtcgcgtgaagtgcaggccgtgctcaatgatgagtggtatcaaagcttccacgcatttacgcgtgtctttggagtgggggtaggcacagcagacaagtggtaccagatgggtctgcgcaccctggaggatgttcgttccagcaagaccctgaagttgaccacgtgggcgaaagtaggtctgacgtattatgaagatcttgctcgcggcgttacccgtgcggaagctgacgcgatttggctgctggttcaggatgcagtcgcaactttcgacccggatgcgatcgtggagattgtcggtggacagcgtcgtgggaaacctcagtctcacgacgttgatctgcttatcagttctccgggagctgaaaaagagcaagaagaccaactcctgcagaaagtgatgaatctgtggaagaaacaagggttgttgctgtgtggtaaagtggtgtggagtcagtgggaatgggggggtctgccgtccggtaaggctgatgagggtgacggggaggcatcgtgctttctgatcctcaaactttatgatcatctggtgcgtaaaagtaaacataatatgccgactggttcgaacatgggcgagtccaaaccgtggaaagcaattaaagtagatctgctgcgttgcccccgcggcagttttgcgtttgcgatgttgcagtggaccggaagccgcatgttccgtcgcgatctgcgcgattacgcccgcgaagagaagaacatgatgctggacaatcatagcctgtatgacatgactcgtggtatccaactccctgctaaatcggaagaggaaattttcgaacatctggggcttgaatacctggaaccgttctatcgtaacgca

SEQ ID NO: 5360 - protein, 529 aa, synthetic construct
  REGION 1..529: note = Variant of terminal deoxynucleotidyltransferase
MHHHHHHGGSGSHGIRTIDSDFGKKQQKKGDNHDSSATYEIKFHEFVLFILEEKMGATRRTFLTDLARKKGFRVENELTDEVTHIVAENLSRSEVLAWLKEHKMEKTKQFELLDISWLIESMKVGKPVDTKGKYQLAESVEVSANPDPTEGRVNELPPTMKTVSPYACERRTTLNNRNQRFTDSLEILRENYVFKGNDDTALEFRRAISVLKSLPFEVRSLKDTEGLPWISDEVKGIMEEIIEVGESREVQAVLNDEWYQSFHAFTRVFGVGVGTADKWYQMGLRTLEDVRSSKTLKLTTWAKVGLTYYEDLARGVTRAEADAIWLLVQDAVATFDPDAIVEIVGGQRRGKPQSHDVDLLISSPGAEKEQEDQLLQKVMNLWKKQGLLLCGKVVWSQWEWGGLPSGKADEGDGEASCFLILKLYDHLVRKSKHNMPTGSNMGESKPWKAIKVDLLRCPRGSFAFAMLQWTGSRMFRRDLRDYAREEKNMMLDNHSLYDMTRGIQLPAKSEEEIFEHLGLEYLEPFYRNA

SEQ ID NO: 5361 - DNA, 1587 bp, synthetic construct
  misc_feature 1..1587: note = Variant of terminal deoxynucleotidyltransferase
  source 1..1587: mol_type = other DNA
atgcaccatcatcatcatcatggcggtagcggcagccacggcattcgtaccatcgattcggacttcgggaagaaacagcagaaaaaaggcgataaccacgatagttccgccacttatgaaatcaaatttcacgagtttgtgctgttcattctcgaagaaaaaatgggtgcgacgcgtcgtacttttctgacagatttagcccgcaagaaagggttccgcgtcgagaatgaactgaccgacgaagttacccacatcgtggcagaaaatctgtcacgctctgaagtattggcttggctgaaagaacacaagatggagaagaccaagcaattcgaactgctggatattagctggcttatcgaaagcatgaaagttggtaaaccggtggacaccaaggggaaataccagttggcggaatcggttgaggtgagtgcgaacccagatccgacagaaggtcgtgtaaacgagctgcctcctactatgaaaaccgtttctccgtatgcgtgtcaacgccgcaccaccctgaacaaccgtaatcaacgttttacggactcgctggagattcttcgcgagaattacgtgtttaaaggctttgacgatactgcgctggaatttcgtcgtgctatctccgtgctgaaaagccttccgtttgaggtacgtagcctgaaagacacggaaggattgccctggatcagtgatgaagtcaaagggattatggaagaaatcatcgaagtcggggagtcgcgtgaagtgcaggccgtgctcaatgatgagtggtatcaaagcttccacgcatttacgcgtgtctttggagtgggggtaggcacagcagacaagtggtaccagatgggtctgcgcaccctggaggatgttcgttccagcaagaccctgaagttgaccacgtgggcgaaagtaggtctgacgtattatgaagatcttgctcgcggcgttacccgtgcggaagctgacgcgatttggctgctggttcaggatgcagtcgcaactttcgacccggatgcgatcgtggagattgtcggtggacagcgtcgtgggaaacctcagtctcacgacgttgatctgcttatcagttctccgggagctgaaaaagagcaagaagaccaactcctgcagaaagtgatgaatctgtggaagaaacaagggttgttgctgtgtggtaaagtggtgtggagtcagtgggaatgggggggtctgccgtccggtaaggctgatgagggtgacggggaggcatcgtgctttctgatcctcaaactttatgatcatctggtgcgtaaaagtaaacataatatgccgactggttcgaacatgggcgagtccaaaccgtggaaagcaattaaagtagatctgctgcgttgcccccgcggcagttttgcgtttgcgatgttgcagtggaccggaagccgcatgttccgtcgcgatctgcgcgattacgcccgcgaagagaagaacatgatgctggacaatcatagcctgtatgacatgactcgtggtatccaactccctgctaaatcggaagaggaaattttcgaacatctggggcttgaatacctggaaccgttctatcgtaacgca

SEQ ID NO: 5362 - protein, 529 aa, synthetic construct
  REGION 1..529: note = Variant of terminal deoxynucleotidyltransferase
MHHHHHHGGSGSHGIRTIDSDFGKKQQKKGDNHDSSATYEIKFHEFVLFILEEKMGATRRTFLTDLARKKGFRVENELTDEVTHIVAENLSRSEVLAWLKEHKMEKTKQFELLDISWLIESMKVGKPVDTKGKYQLAESVEVSANPDPTEGRVNELPPTMKTVSPYACQRRTTLNNRNQRFTDSLEILRENYVFKGFDDTALEFRRAISVLKSLPFEVRSLKDTEGLPWISDEVKGIMEEIIEVGESREVQAVLNDEWYQSFHAFTRVFGVGVGTADKWYQMGLRTLEDVRSSKTLKLTTWAKVGLTYYEDLARGVTRAEADAIWLLVQDAVATFDPDAIVEIVGGQRRGKPQSHDVDLLISSPGAEKEQEDQLLQKVMNLWKKQGLLLCGKVVWSQWEWGGLPSGKADEGDGEASCFLILKLYDHLVRKSKHNMPTGSNMGESKPWKAIKVDLLRCPRGSFAFAMLQWTGSRMFRRDLRDYAREEKNMMLDNHSLYDMTRGIQLPAKSEEEIFEHLGLEYLEPFYRNA

SEQ ID NO: 5363 - DNA, 1587 bp, synthetic construct
  misc_feature 1..1587: note = Variant of terminal deoxynucleotidyltransferase
  source 1..1587: mol_type = other DNA
atgcaccatcatcatcatcatggcggtagcggcagccacggcattcgtaccatcgattcggacttcgggaagaaacagcagaaaaaaggcgataaccacgatagttccgccacttatgaaatcaaatttcacgagtttgtgctgttcattctcgaagaaaaaatgggtgcgacgcgtcgtacttttctgacagatttagcccgcaagaaagggttccgcgtcgagaatgaactgaccgacgaagttacccacatcgtggcagaaaatctgtcacgctctgaagtattggcttggctgaaagaacacaagatggagaagaccaagcaattcgaactgctggatattagctggcttatcgaaagcatgaaagttggtaaaccggtggacaccaaggggaaataccagttggcggaatcggttgaggtgagtgcgaacccagatccgacagaaggtcgtgtaaacgagctgcctcctactatgaaaaccgtttctccgtatgcgtgtcaacgccgcaccaccctgaacaaccgtaatgggcgttttacggactcgctggagattcttcgcgagaattacgtgtttaaaggcaacgacgatactgcgctggaatttcgtcgtgctatctccgtgctgaaaagccttccgtttgaggtacgtagcctgaaagacacggaaggattgccctggatcagtgatgaagtcaaagggattatggaagaaatcatcgaagtcggggagtcgcgtgaagtgcaggccgtgctcaatgatgagtggtatcaaagcttccacgcatttacgcgtgtctttggagtgggggtaggcacagcagacaagtggtaccagatgggtctgcgcaccctggaggatgttcgttccagcaagaccctgaagttgaccacgtgggcgaaagtaggtctgacgtattatgaagatcttgctcgcggcgttacccgtgcggaagctgacgcgatttggctgctggttcaggatgcagtcgcaactttcgacccggatgcgatcgtggagattgtcggtggacagcgtcgtgggaaacctcagtctcacgacgttgatctgcttatcagttctccgggagctgaaaaagagcaagaagaccaactcctgcagaaagtgatgaatctgtggaagaaacaagggttgttgctgtgtggtaaagtggtgtggagtcagtgggaatgggggggtctgccgtccggtaaggctgatgagggtgacggggaggcatcgtgctttctgatcctcaaactttatgatcatctggtgcgtaaaagtaaacataatatgccgactggttcgaacatgggcgagtccaaaccgtggaaagcaattaaagtagatctgctgcgttgcccccgcggcagttttgcgtttgcgatgttgcagtggaccggaagccgcatgttccgtcgcgatctgcgcgattacgcccgcgaagagaagaacatgatgctggacaatcatagcctgtatgacatgactcgtggtatccaactccctgctaaatcggaagaggaaattttcgaacatctggggcttgaatacctggaaccgttctatcgtaacgca

SEQ ID NO: 5364 - protein, 529 aa, synthetic construct
  REGION 1..529: note = Variant of terminal deoxynucleotidyltransferase
MHHHHHHGGSGSHGIRTIDSDFGKKQQKKGDNHDSSATYEIKFHEFVLFILEEKMGATRRTFLTDLARKKGFRVENELTDEVTHIVAENLSRSEVLAWLKEHKMEKTKQFELLDISWLIESMKVGKPVDTKGKYQLAESVEVSANPDPTEGRVNELPPTMKTVSPYACQRRTTLNNRNGRFTDSLEILRENYVFKGNDDTALEFRRAISVLKSLPFEVRSLKDTEGLPWISDEVKGIMEEIIEVGESREVQAVLNDEWYQSFHAFTRVFGVGVGTADKWYQMGLRTLEDVRSSKTLKLTTWAKVGLTYYEDLARGVTRAEADAIWLLVQDAVATFDPDAIVEIVGGQRRGKPQSHDVDLLISSPGAEKEQEDQLLQKVMNLWKKQGLLLCGKVVWSQWEWGGLPSGKADEGDGEASCFLILKLYDHLVRKSKHNMPTGSNMGESKPWKAIKVDLLRCPRGSFAFAMLQWTGSRMFRRDLRDYAREEKNMMLDNHSLYDMTRGIQLPAKSEEEIFEHLGLEYLEPFYRNA

SEQ ID NO: 5365 - DNA, 1587 bp, synthetic construct
  misc_feature 1..1587: note = Variant of terminal deoxynucleotidyltransferase
  source 1..1587: mol_type = other DNA
atgcaccatcatcatcatcatggcggtagcggcagccacggcattcgtaccatcgattcggacttcgggaagaaacagcagaaaaaaggcgataaccacgatagttccgccacttatgaaatcaaatttcacgagtttgtgctgttcattctcgaagaaaaaatgggtgcgacgcgtcgtacttttctgacagatttagcccgcaagaaagggttccgcgtcgagaatgaactgaccgacgaagttacccacatcgtggcagaaaatctgtcacgctctgaagtattggcttggctgaaagaacacaagatggagaagaccaagcaattcgaactgctggatattagctggcttatcgaaagcatgaaagttggtaaaccggtggacaccaaggggaaataccagttggcggaatcggttgaggtgagtgcgaacccagatccgacagaaggtcgtgtaaacgagctgcctcctactatgaaaaccgtttctccgtatgcgtgtcaacgccgcaccaccctgaacaaccgtaatcaacgttttacggactcgctggagattcttcgcgagaattacgtgtttaaaggcaacgacgatactgcgctggaatttcgtcgtgctatctccgtgctgaaaagccttccgtttgaggtacgtagcctgaaagacacggaaggattgccctggatcagtgatgaagtcaaagggattatggaagaaatcatcgaagtcggggagtcgcgtgaagtgcaggccgtgctcaatgatgagtggtatcaaagcttccacgcatttacgcgtgtctttggagtgggggtaggcacagcagacaagtggtaccagatgggtctgcgcaccctggaggatgttcgttccagcaagaccctgaagttgaccacgtgggcgaaagtaggtctgacgtattatgaagatcttgctcgcggcgttacccgtgcggaagctgacgcgatttggctgctggttcaggatgcagtcgcaactttcgacccggatgcgatcgtggagattgtcggtggacagcgtcgtgggaaacctcagtctcacgacgttgatctgcttatcagttctccgggagctgaaaaagagcaagaagaccaactcctgcagaaagtgatgaatctgtggtcgaaacaagggttgttgctgtgtggtaaagtggtgtggagtcagtgggaatgggggggtctgccgtccggtaaggctgatgagggtgacggggaggcatcgtgctttctgatcctcaaactttatgatcatctggtgcgtaaaagtaaacataatatgccgactggttcgaacatgggcgagtccaaaccgtggaaagcaattaaagtagatctgctgcgttgcccccgcggcagttttgcgtttgcgatgttgcagtggaccggaagccgcatgttccgtcgcgatctgcgcgattacgcccgcgaagagaagaacatgatgctggacaatcatagcctgtatgacatgactcgtggtatccaactccctgctaaatcggaagaggaaattttcgaacatctggggcttgaatacctggaaccgttctatcgtaacgca

SEQ ID NO: 5366 - protein, 529 aa, synthetic construct
  REGION 1..529: note = Variant of terminal deoxynucleotidyltransferase
MHHHHHHGGSGSHGIRTIDSDFGKKQQKKGDNHDSSATYEIKFHEFVLFILEEKMGATRRTFLTDLARKKGFRVENELTDEVTHIVAENLSRSEVLAWLKEHKMEKTKQFELLDISWLIESMKVGKPVDTKGKYQLAESVEVSANPDPTEGRVNELPPTMKTVSPYACQRRTTLNNRNQRFTDSLEILRENYVFKGNDDTALEFRRAISVLKSLPFEVRSLKDTEGLPWISDEVKGIMEEIIEVGESREVQAVLNDEWYQSFHAFTRVFGVGVGTADKWYQMGLRTLEDVRSSKTLKLTTWAKVGLTYYEDLARGVTRAEADAIWLLVQDAVATFDPDAIVEIVGGQRRGKPQSHDVDLLISSPGAEKEQEDQLLQKVMNLWSKQGLLLCGKVVWSQWEWGGLPSGKADEGDGEASCFLILKLYDHLVRKSKHNMPTGSNMGESKPWKAIKVDLLRCPRGSFAFAMLQWTGSRMFRRDLRDYAREEKNMMLDNHSLYDMTRGIQLPAKSEEEIFEHLGLEYLEPFYRNA

SEQ ID NO: 5367 - DNA, 1587 bp, synthetic construct
  misc_feature 1..1587: note = Variant of terminal deoxynucleotidyltransferase
  source 1..1587: mol_type = other DNA
atgcaccatcatcatcatcatggcggtagcggcagccacggcattcgtaccatcgattcggacttcgggaagaaacagcagaaaaaaggcgataaccacgatagttccgccacttatgaaatcaaatttcacgagtttgtgctgttcattctcgaagaaaaaatgggtgcgacgcgtcgtacttttctgacagatttagcccgcaagaaagggttccgcgtcgagaatgaactgaccgacgaagttacccacatcgtggcagaaaatctgtcacgctctgaagtattggcttggctgaaagaacacaagatggagaagaccaagcaattcgaactgctggatattagctggcttatcgaaagcatgaaagttggtaaaccggtggacaccaaggggaaataccagttggcggaatcggttgaggtgagtgcgaacccagatccgacagaaggtcgtgtaaacgagctgcctcctactatgaaaaccgtttctccgtatgcgtgtcaacgccgcaccaccctgaacaaccgtaatcaacgttttacggactcgctggagattcttcgcgagaattacgtgtttaaaggcaacgacgatactgcgctggaatttcgtcgtgctatctccgtgctgaaaagccttccgtttgaggtacgtagcctgaaagacacggaaggattgccctggatcagtgatgaagtcaaagggattatggaagaaatcatcgaagtcggggagtcgcgtgaagtgcaggccgtgctcaatgatgagtggtatcaaagcttccacgcatttacgcgtgtctttggagtgggggtaggcacagcagacaagtggtaccagatgggtctgcgcaccctggaggatgttcgtcttagcaagaccctgaagttgaccacgtgggcgaaagtaggtctgacgtattatgaagatcttgctcgcggcgttacccgtgcggaagctgacgcgatttggctgctggttcaggatgcagtcgcaactttcgacccggatgcgatcgtggagattgtcggtggacagcgtcgtgggaaacctcagtctcacgacgttgatctgcttatcagttctccgggagctgaaaaagagcaagaagaccaactcctgcagaaagtgatgaatctgtggaagaaacaagggttgttgctgtgtggtaaagtggtgtggagtcagtgggaatgggggggtctgccgtccggtaaggctgatgagggtgacggggaggcatcgtgctttctgatcctcaaactttatgatcatctggtgcgtaaaagtaaacataatatgccgactggttcgaacatgggcgagtccaaaccgtggaaagcaattaaagtagatctgctgcgttgcccccgcggcagttttgcgtttgcgatgttgcagtggaccggaagccgcatgttccgtcgcgatctgcgcgattacgcccgcgaagagaagaacatgatgctggacaatcatagcctgtatgacatgactcgtggtatccaactccctgctaaatcggaagaggaaattttcgaacatctggggcttgaatacctggaaccgttctatcgtaacgca

SEQ ID NO: 5368 - protein, 529 aa, synthetic construct
  REGION 1..529: note = Variant of terminal deoxynucleotidyltransferase
MHHHHHHGGSGSHGIRTIDSDFGKKQQKKGDNHDSSATYEIKFHEFVLFILEEKMGATRRTFLTDLARKKGFRVENELTDEVTHIVAENLSRSEVLAWLKEHKMEKTKQFELLDISWLIESMKVGKPVDTKGKYQLAESVEVSANPDPTEGRVNELPPTMKTVSPYACQRRTTLNNRNQRFTDSLEILRENYVFKGNDDTALEFRRAISVLKSLPFEVRSLKDTEGLPWISDEVKGIMEEIIEVGESREVQAVLNDEWYQSFHAFTRVFGVGVGTADKWYQMGLRTLEDVRLSKTLKLTTWAKVGLTYYEDLARGVTRAEADAIWLLVQDAVATFDPDAIVEIVGGQRRGKPQSHDVDLLISSPGAEKEQEDQLLQKVMNLWKKQGLLLCGKVVWSQWEWGGLPSGKADEGDGEASCFLILKLYDHLVRKSKHNMPTGSNMGESKPWKAIKVDLLRCPRGSFAFAMLQWTGSRMFRRDLRDYAREEKNMMLDNHSLYDMTRGIQLPAKSEEEIFEHLGLEYLEPFYRNA

SEQ ID NO: 5369 - DNA, 1587 bp, synthetic construct
  misc_feature 1..1587: note = Variant of terminal deoxynucleotidyltransferase
  source 1..1587: mol_type = other DNA
atgcaccatcatcatcatcatggcggtagcggcagccacggcattcgtaccatcgattcggacttcgggaagaaacagcagaaaaaaggcgataaccacgatagttccgccacttatgaaatcaaatttcacgagtttgtgctgttcattctcgaagaaaaaatgggtgcgacgcgtcgtacttttctgacagatttagcccgcaagaaagggttccgcgtcgagaatgaactgaccgacgaagttacccacatcgtggcagaaaatctgtcacgctctgaagtattggcttggctgaaagaacacaagatggagaagaccaagcaattcgaactgctggatattagctggcttatcgaaagcatgaaagttggtaaaccggtggacaccaaggggaaataccagttggcggaatcggttgaggtgagtgcgaacccagatccgacagaaggtcgtgtaaacgagctgcctcctactatgaaaaccgtttctccgtatgcgtgtcaacgccgcaccaccctgaacaaccgtaatcaacgttttacggactcgctggagattcttcgcgagaattacgtgtttaaaggcaacgacggtactgcgctggaatttcgtcgtgctatctccgtgctgaaaagccttccgtttgaggtacgtagcctgaaagacacggaaggattgccctggatcagtgatgaagtcaaagggattatggaagaaatcatcgaagtcggggagtcgcgtgaagtgcaggccgtgctcaatgatgagtggtatcaaagcttccacgcatttacgcgtgtctttggagtgggggtaggcacagcagacaagtggtaccagatgggtctgcgcaccctggaggatgttcgttccagcaagaccctgaagttgaccacgtgggcgaaagtaggtctgacgtattatgaagatcttgctcgcggcgttacccgtgcggaagctgacgcgatttggctgctggttcaggatgcagtcgcaactttcgacccggatgcgatcgtggagattgtcggtggacagcgtcgtgggaaacctcagtctcacgacgttgatctgcttatcagttctccgggagctgaaaaagagcaagaagaccaactcctgcagaaagtgatgaatctgtggaagaaacaagggttgttgctgtgtggtaaagtggtgtggagtcagtgggaatgggggggtctgccgtccggtaaggctgatgagggtgacggggaggcatcgtgctttctgatcctcaaactttatgatcatctggtgcgtaaaagtaaacataatatgccgactggttcgaacatgggcgagtccaaaccgtggaaagcaattaaagtagatctgctgcgttgcccccgcggcagttttgcgtttgcgatgttgcagtggaccggaagccgcatgttccgtcgcgatctgcgcgattacgcccgcgaagagaagaacatgatgctggacaatcatagcctgtatgacatgactcgtggtatccaactccctgctaaatcggaagaggaaattttcgaacatctggggcttgaatacctggaaccgttctatcgtaacgca

SEQ ID NO: 5370 - protein, 529 aa, synthetic construct
  REGION 1..529: note = Variant of terminal deoxynucleotidyltransferase
MHHHHHHGGSGSHGIRTIDSDFGKKQQKKGDNHDSSATYEIKFHEFVLFILEEKMGATRRTFLTDLARKKGFRVENELTDEVTHIVAENLSRSEVLAWLKEHKMEKTKQFELLDISWLIESMKVGKPVDTKGKYQLAESVEVSANPDPTEGRVNELPPTMKTVSPYACQRRTTLNNRNQRFTDSLEILRENYVFKGNDGTALEFRRAISVLKSLPFEVRSLKDTEGLPWISDEVKGIMEEIIEVGESREVQAVLNDEWYQSFHAFTRVFGVGVGTADKWYQMGLRTLEDVRSSKTLKLTTWAKVGLTYYEDLARGVTRAEADAIWLLVQDAVATFDPDAIVEIVGGQRRGKPQSHDVDLLISSPGAEKEQEDQLLQKVMNLWKKQGLLLCGKVVWSQWEWGGLPSGKADEGDGEASCFLILKLYDHLVRKSKHNMPTGSNMGESKPWKAIKVDLLRCPRGSFAFAMLQWTGSRMFRRDLRDYAREEKNMMLDNHSLYDMTRGIQLPAKSEEEIFEHLGLEYLEPFYRNA

SEQ ID NO: 5371 - DNA, 1587 bp, synthetic construct
  misc_feature 1..1587: note = Variant of terminal deoxynucleotidyltransferase
  source 1..1587: mol_type = other DNA
atgcaccatcatcatcatcatggcggtagcggcagccacggcattcgtaccatcgattcggacttcgggaagaaacagcagaaaaaaggcgataaccacgatagttccgccacttatgaaatcaaatttcacgagtttgtgctgttcattctcgaagaaaaaatgggtgcgacgcgtcgtacttttctgacagatttagcccgcaagaaagggttccgcgtcgagaatgaactgaccgacgaagttacccacatcgtggcagaaaatctgtcacgctctgaagtattggcttggctgaaagaacacaagatggagaagaccaagcaattcgaactgctggatattagctggcttatcgaaagcatgaaagttggtaaaccggtggacaccaaggggaaataccagttggcggaatcggttgaggtgagtgcgaacccagatccgacagaaggtcgtgtaaacgagctgcctcctactatgaaaaccgtttctccgtatgcgtgtcaacgccgcaccaccctgaacaaccgtaatcaacgttttacggactcgctggagattcttcgcgagaattacgtgtttaaaggcaacgacgatactgcgctggaatttcgtcgtgctatctccgtgctgaaaagccttccgtttgaggtacgtagcctgaaagacacggaaggattgccctggatcagtgatgaagtcaaagggattatggaagaaatcatcgaagtcggggagtcgcgtgaagtgcaggccgtgctcaatgatgagtggtatcaaagcttccacgcatttacgcgtgtctttggagtgggggtaggcacagcagacaagtggtaccagatgggtctgcgcaccctggaggatgttcgttccagcaagcttctgaagttgaccacgtgggcgaaagtaggtctgacgtattatgaagatcttgctcgcggcgttacccgtgcggaagctgacgcgatttggctgctggttcaggatgcagtcgcaactttcgacccggatgcgatcgtggagattgtcggtggacagcgtcgtgggaaacctcagtctcacgacgttgatctgcttatcagttctccgggagctgaaaaagagcaagaagaccaactcctgcagaaagtgatgaatctgtggaagaaacaagggttgttgctgtgtggtaaagtggtgtggagtcagtgggaatgggggggtctgccgtccggtaaggctgatgagggtgacggggaggcatcgtgctttctgatcctcaaactttatgatcatctggtgcgtaaaagtaaacataatatgccgactggttcgaacatgggcgagtccaaaccgtggaaagcaattaaagtagatctgctgcgttgcccccgcggcagttttgcgtttgcgatgttgcagtggaccggaagccgcatgttccgtcgcgatctgcgcgattacgcccgcgaagagaagaacatgatgctggacaatcatagcctgtatgacatgactcgtggtatccaactccctgctaaatcggaagaggaaattttcgaacatctggggcttgaatacctggaaccgttctatcgtaacgca

SEQ ID NO: 5372 - protein, 529 aa, synthetic construct
  REGION 1..529: note = Variant of terminal deoxynucleotidyltransferase
MHHHHHHGGSGSHGIRTIDSDFGKKQQKKGDNHDSSATYEIKFHEFVLFILEEKMGATRRTFLTDLARKKGFRVENELTDEVTHIVAENLSRSEVLAWLKEHKMEKTKQFELLDISWLIESMKVGKPVDTKGKYQLAESVEVSANPDPTEGRVNELPPTMKTVSPYACQRRTTLNNRNQRFTDSLEILRENYVFKGNDDTALEFRRAISVLKSLPFEVRSLKDTEGLPWISDEVKGIMEEIIEVGESREVQAVLNDEWYQSFHAFTRVFGVGVGTADKWYQMGLRTLEDVRSSKLLKLTTWAKVGLTYYEDLARGVTRAEADAIWLLVQDAVATFDPDAIVEIVGGQRRGKPQSHDVDLLISSPGAEKEQEDQLLQKVMNLWKKQGLLLCGKVVWSQWEWGGLPSGKADEGDGEASCFLILKLYDHLVRKSKHNMPTGSNMGESKPWKAIKVDLLRCPRGSFAFAMLQWTGSRMFRRDLRDYAREEKNMMLDNHSLYDMTRGIQLPAKSEEEIFEHLGLEYLEPFYRNA

SEQ ID NO: 5373 - DNA, 1587 bp, synthetic construct
  misc_feature 1..1587: note = Variant of terminal deoxynucleotidyltransferase
  source 1..1587: mol_type = other DNA
atgcaccatcatcatcatcatggcggtagcggcagccacggcattcgtaccatcgattcggacttcgggaagaaacagcagaaaaaaggcgataaccacgatagttccgccacttatgaaatcaaatttcacgagtttgtgctgttcattctcgaagaaaaaatgggtgcgacgcgtcgtacttttctgacagatttagcccgcaagaaagggttccgcgtcgagaatgaactgaccgacgaagttacccacatcgtggcagaaaatctgtcacgctctgaagtattggcttggctgaaagaacacaagatggagaagaccaagcaattcgaactgctggatattagctggcttatcgaaagcatgaaagttggtaaaccggtggacaccaaggggaaataccagttggcggaatcggttgaggtgagtgcgaacccagatccgacagaaggtcgtgtaaacgagctgcctcctactatgaaaaccgtttctccgtatgcgtgtcaacgccgcaccaccctgaacaaccgtaatcaacgttttacggactcgctggagattcttcgcgagaattacgtgtttaaaggcaacgacgatactgcgctggaatttcgtcgtgctatctccgtgctgaaaagccttccgtttgaggtacgtagcctgaaagacacggaaggattgccctggatcagtgatgaagtcaaagggattatggaagaaatcatcgaagtcggggagtcgcgtgaagtgcaggccgtgctcaatgatgagtggtatcaaagcttccacgcatttacgcgtgtctttggagtgggggtaggcacagcagacaagtggtaccagatgggtctgcgcaccctggaggatgttcgttccagcaagaccctgaagttgaccacgtgggcgaaagtaggtctgacgtattatgaagatcttgctcgcggcgttacccgtgcggaagctgacgcgattatgctgctggttcaggatgcagtcgcaactttcgacccggatgcgatcgtggagattgtcggtggacagcgtcgtgggaaacctcagtctcacgacgttgatctgcttatcagttctccgggagctgaaaaagagcaagaagaccaactcctgcagaaagtgatgaatctgtggaagaaacaagggttgttgctgtgtggtaaagtggtgtggagtcagtgggaatgggggggtctgccgtccggtaaggctgatgagggtgacggggaggcatcgtgctttctgatcctcaaactttatgatcatctggtgcgtaaaagtaaacataatatgccgactggttcgaacatgggcgagtccaaaccgtggaaagcaattaaagtagatctgctgcgttgcccccgcggcagttttgcgtttgcgatgttgcagtggaccggaagccgcatgttccgtcgcgatctgcgcgattacgcccgcgaagagaagaacatgatgctggacaatcatagcctgtatgacatgactcgtggtatccaactccctgctaaatcggaagaggaaattttcgaacatctggggcttgaatacctggaaccgttctatcgtaacgca

SEQ ID NO: 5374 - protein, 529 aa, synthetic construct
  REGION 1..529: note = Variant of terminal deoxynucleotidyltransferase
MHHHHHHGGSGSHGIRTIDSDFGKKQQKKGDNHDSSATYEIKFHEFVLFILEEKMGATRRTFLTDLARKKGFRVENELTDEVTHIVAENLSRSEVLAWLKEHKMEKTKQFELLDISWLIESMKVGKPVDTKGKYQLAESVEVSANPDPTEGRVNELPPTMKTVSPYACQRRTTLNNRNQRFTDSLEILRENYVFKGNDDTALEFRRAISVLKSLPFEVRSLKDTEGLPWISDEVKGIMEEIIEVGESREVQAVLNDEWYQSFHAFTRVFGVGVGTADKWYQMGLRTLEDVRSSKTLKLTTWAKVGLTYYEDLARGVTRAEADAIMLLVQDAVATFDPDAIVEIVGGQRRGKPQSHDVDLLISSPGAEKEQEDQLLQKVMNLWKKQGLLLCGKVVWSQWEWGGLPSGKADEGDGEASCFLILKLYDHLVRKSKHNMPTGSNMGESKPWKAIKVDLLRCPRGSFAFAMLQWTGSRMFRRDLRDYAREEKNMMLDNHSLYDMTRGIQLPAKSEEEIFEHLGLEYLEPFYRNA

SEQ ID NO: 5375 - DNA, 1587 bp, synthetic construct
  misc_feature 1..1587: note = Variant of terminal deoxynucleotidyltransferase
  source 1..1587: mol_type = other DNA
atgcaccatcatcatcatcatggcggtagcggcagccacggcattcgtaccatcgattcggacttcgggaagaaacagcagaaaaaaggcgataaccacgatagttccgccacttatgaaatcaaatttcacgagtttgtgctgttcattctcgaagaaaaaatgggtgcgacgcgtcgtacttttctgacagatttagcccgcaagaaagggttccgcgtcgagaatgaactgaccgacgaagttacccacatcgtggcagaaaatctgtcacgctctgaagtattggcttggctgaaagaacacaagatggagaagaccaagcaattcgaactgctggatattagctggcttatcgaaagcatgaaagttggtaaaccggtggacaccaaggggaaataccagttggcggaatcggttgaggtgagtgcgaacccagatccgacagaaggtcgtgtaaacgagctgcctcctactatgaaaaccgtttctccgtatgcgtgtcaacgccgcaccaccctgaacaaccgtaatcaacgttttacggactcgctggagattcttcgcgagaattacgtgtttaaaggcaacgacgatactgcgctggaatttcgtcgtgctatctccgtgctgaaaagccttccgtttgaggtacgtagcctgaaagacacggaaggattgccctggatcagtgatgaagtcaaagggattatggaagaaatcatcgaagtcggggagtcgcgtgaagtgcaggccgtgctcaatgatgagtggtatcaaagcttccacgcatttacgcgtgtctttggagtgggggtaggcacagcagacaagtggtaccagatgggtctgcgcaccctggaggatgttcgttccagcaagaccctgaagttgaccacgtgggcgaaagtaggtctgacgtattatgaagatcttgctcgcggcgttacccgtgcggaagctgacgcgatttggctgctggttcaggatgcagtcgcaactttcgacccggatgcgatcgtggagattgtcggtggacagcgtcgtgggaaacctcagtctcacgacgttgatctgcttatcagttctccgggagctgaaaaagagcaagaagacgggctcctgcagaaagtgatgaatctgtggaagaaacaagggttgttgctgtgtggtaaagtggtgtggagtcagtgggaatgggggggtctgccgtccggtaaggctgatgagggtgacggggaggcatcgtgctttctgatcctcaaactttatgatcatctggtgcgtaaaagtaaacataatatgccgactggttcgaacatgggcgagtccaaaccgtggaaagcaattaaagtagatctgctgcgttgcccccgcggcagttttgcgtttgcgatgttgcagtggaccggaagccgcatgttccgtcgcgatctgcgcgattacgcccgcgaagagaagaacatgatgctggacaatcatagcctgtatgacatgactcgtggtatccaactccctgctaaatcggaagaggaaattttcgaacatctggggcttgaatacctggaaccgttctatcgtaacgca

SEQ ID NO: 5376 - protein, 529 aa, synthetic construct
  REGION 1..529: note = Variant of terminal deoxynucleotidyltransferase
MHHHHHHGGSGSHGIRTIDSDFGKKQQKKGDNHDSSATYEIKFHEFVLFILEEKMGATRRTFLTDLARKKGFRVENELTDEVTHIVAENLSRSEVLAWLKEHKMEKTKQFELLDISWLIESMKVGKPVDTKGKYQLAESVEVSANPDPTEGRVNELPPTMKTVSPYACQRRTTLNNRNQRFTDSLEILRENYVFKGNDDTALEFRRAISVLKSLPFEVRSLKDTEGLPWISDEVKGIMEEIIEVGESREVQAVLNDEWYQSFHAFTRVFGVGVGTADKWYQMGLRTLEDVRSSKTLKLTTWAKVGLTYYEDLARGVTRAEADAIWLLVQDAVATFDPDAIVEIVGGQRRGKPQSHDVDLLISSPGAEKEQEDGLLQKVMNLWKKQGLLLCGKVVWSQWEWGGLPSGKADEGDGEASCFLILKLYDHLVRKSKHNMPTGSNMGESKPWKAIKVDLLRCPRGSFAFAMLQWTGSRMFRRDLRDYAREEKNMMLDNHSLYDMTRGIQLPAKSEEEIFEHLGLEYLEPFYRNA

SEQ ID NO: 5377 - DNA, 1587 bp, synthetic construct
  misc_feature 1..1587: note = Variant of terminal deoxynucleotidyltransferase
  source 1..1587: mol_type = other DNA
atgcaccatcatcatcatcatggcggtagcggcagccacggcattcgtaccatcgattcggacttcgggaagaaacagcagaaaaaaggcgataaccacgatagttccgccacttatgaaatcaaatttcacgagtttgtgctgttcattctcgaagaaaaaatgggtgcgacgcgtcgtacttttctgacagatttagcccgcaagaaagggttccgcgtcgagaatgaactgaccgacgaagttacccacatcgtggcagaaaatctgtcacgctctgaagtattggcttggctgaaagaacacaagatggagaagaccaagcaattcgaactgctggatattagctggcttatcgaaagcatgaaagttggtaaaccggtggacaccaaggggaaataccagttggcggaatcggttgaggtgagtgcgaacccagatccgacagaaggtcgtgtaaacgagctgcctcctactatgaaaaccgtttctccgtatgcgtgtcaacgccgcaccaccctgaacaaccgtaatcaacgttttacggactcgctggagattcttcgcgagaattacgtgtttaaaggcaacgacgatactgcgctggaatttcgtcgtgctatctccgtgctgaaaagccttccgtttgaggtacgtagcctgaaagacacggaaggattgccctggatcagtgatgaagtcaaagggattatggaagaaatcatcgaagtcggggagtcgcgtgaagtgcaggccgtgctcaatgatgagtggtatcaaagcttccacgcatttacgcgtgtctttggagtgggggtaggcacagcagacaagtggtaccagatgggtctgcgcaccctggaggatgttcgttccagcaagaccctgaagttgaccacgtgggcgaaagtaggtctgacgtattatgaagatcttgctcgcggcgttacccgtgcggaagctgacgcgatttggctgctggttcaggatgcagtcgcaactttcgacccggatgcgatcgtggagattgtcggtggacagcgtcgtgggaaacctcagtctcacgacgttgatctgcttatcagttctccgggagctgaaaaagagcaagaagaccaactcctgcagaaagtgatgaatctgtggaagaaacaagggttgttgctgtgtggtaaagtgtggtggagtcagtgggaatgggggggtctgccgtccggtaaggctgatgagggtgacggggaggcatcgtgctttctgatcctcaaactttatgatcatctggtgcgtaaaagtaaacataatatgccgactggttcgaacatgggcgagtccaaaccgtggaaagcaattaaagtagatctgctgcgttgcccccgcggcagttttgcgtttgcgatgttgcagtggaccggaagccgcatgttccgtcgcgatctgcgcgattacgcccgcgaagagaagaacatgatgctggacaatcatagcctgtatgacatgactcgtggtatccaactccctgctaaatcggaagaggaaattttcgaacatctggggcttgaatacctggaaccgttctatcgtaacgca

SEQ ID NO: 5378 - protein, 529 aa, synthetic construct
  REGION 1..529: note = Variant of terminal deoxynucleotidyltransferase
MHHHHHHGGSGSHGIRTIDSDFGKKQQKKGDNHDSSATYEIKFHEFVLFILEEKMGATRRTFLTDLARKKGFRVENELTDEVTHIVAENLSRSEVLAWLKEHKMEKTKQFELLDISWLIESMKVGKPVDTKGKYQLAESVEVSANPDPTEGRVNELPPTMKTVSPYACQRRTTLNNRNQRFTDSLEILRENYVFKGNDDTALEFRRAISVLKSLPFEVRSLKDTEGLPWISDEVKGIMEEIIEVGESREVQAVLNDEWYQSFHAFTRVFGVGVGTADKWYQMGLRTLEDVRSSKTLKLTTWAKVGLTYYEDLARGVTRAEADAIWLLVQDAVATFDPDAIVEIVGGQRRGKPQSHDVDLLISSPGAEKEQEDQLLQKVMNLWKKQGLLLCGKVWWSQWEWGGLPSGKADEGDGEASCFLILKLYDHLVRKSKHNMPTGSNMGESKPWKAIKVDLLRCPRGSFAFAMLQWTGSRMFRRDLRDYAREEKNMMLDNHSLYDMTRGIQLPAKSEEEIFEHLGLEYLEPFYRNA

SEQ ID NO: 5379 - DNA, 1587 bp, synthetic construct
  misc_feature 1..1587: note = Variant of terminal deoxynucleotidyltransferase
  source 1..1587: mol_type = other DNA
atgcaccatcatcatcatcatggcggtagcggcagccacggcattcgtaccatcgattcggacttcgggaagaaacagcagaaaaaaggcgataaccacgatagttccgccacttatgaaatcaaatttcacgagtttgtgctgttcattctcgaagaaaaaatgggtgcgacgcgtcgtacttttctgacagatttagcccgcaagaaagggttccgcgtcgagaatgaactgaccgacgaagttacccacatcgtggcagaaaatctgtcacgctctgaagtattggcttggctgaaagaacacaagatggagaagaccaagcaattcgaactgctggatattagctggcttatcgaaagcatgaaagttggtaaaccggtggacaccaaggggaaataccagttggcggaatcggttgaggtgagtgcgaacccagatccgacagaaggtcgtgtaaacgagctgcctcctactatgaaaaccgtttctccgtatgcgtgtcaacgccgcaccaccctgaacaaccgtaatcaacgttttacggactcgctggagattcttcgcgagaattacgtgtttaaaggcaactcggatactgcgctggaatttcgtcgtgctatctccgtgctgaaaagccttccgtttgaggtacgtagcctgaaagacacggaaggattgccctggatcagtgatgaagtcaaagggattatggaagaaatcatcgaagtcggggagtcgcgtgaagtgcaggccgtgctcaatgatgagtggtatcaaagcttccacgcatttacgcgtgtctttggagtgggggtaggcacagcagacaagtggtaccagatgggtctgcgcaccctggaggatgttcgttccagcaagaccctgaagttgaccacgtgggcgaaagtaggtctgacgtattatgaagatcttgctcgcggcgttacccgtgcggaagctgacgcgatttggctgctggttcaggatgcagtcgcaactttcgacccggatgcgatcgtggagattgtcggtggacagcgtcgtgggaaacctcagtctcacgacgttgatctgcttatcagttctccgggagctgaaaaagagcaagaagaccaactcctgcagaaagtgatgaatctgtggaagaaacaagggttgttgctgtgtggtaaagtggtgtggagtcagtgggaatgggggggtctgccgtccggtaaggctgatgagggtgacggggaggcatcgtgctttctgatcctcaaactttatgatcatctggtgcgtaaaagtaaacataatatgccgactggttcgaacatgggcgagtccaaaccgtggaaagcaattaaagtagatctgctgcgttgcccccgcggcagttttgcgtttgcgatgttgcagtggaccggaagccgcatgttccgtcgcgatctgcgcgattacgcccgcgaagagaagaacatgatgctggacaatcatagcctgtatgacatgactcgtggtatccaactccctgctaaatcggaagaggaaattttcgaacatctggggcttgaatacctggaaccgttctatcgtaacgca

SEQ ID NO: 5380 - protein, 529 aa, synthetic construct
  REGION 1..529: note = Variant of terminal deoxynucleotidyltransferase
MHHHHHHGGSGSHGIRTIDSDFGKKQQKKGDNHDSSATYEIKFHEFVLFILEEKMGATRRTFLTDLARKKGFRVENELTDEVTHIVAENLSRSEVLAWLKEHKMEKTKQFELLDISWLIESMKVGKPVDTKGKYQLAESVEVSANPDPTEGRVNELPPTMKTVSPYACQRRTTLNNRNQRFTDSLEILRENYVFKGNSDTALEFRRAISVLKSLPFEVRSLKDTEGLPWISDEVKGIMEEIIEVGESREVQAVLNDEWYQSFHAFTRVFGVGVGTADKWYQMGLRTLEDVRSSKTLKLTTWAKVGLTYYEDLARGVTRAEADAIWLLVQDAVATFDPDAIVEIVGGQRRGKPQSHDVDLLISSPGAEKEQEDQLLQKVMNLWKKQGLLLCGKVVWSQWEWGGLPSGKADEGDGEASCFLILKLYDHLVRKSKHNMPTGSNMGESKPWKAIKVDLLRCPRGSFAFAMLQWTGSRMFRRDLRDYAREEKNMMLDNHSLYDMTRGIQLPAKSEEEIFEHLGLEYLEPFYRNA

SEQ ID NO: 5381 - DNA, 1587 bp, synthetic construct
  misc_feature 1..1587: note = Variant of terminal deoxynucleotidyltransferase
  source 1..1587: mol_type = other DNA
atgcaccatcatcatcatcatggcggtagcggcagccacggcattcgtaccatcgattcggacttcgggaagaaacagcagaaaaaaggcgataaccacgatagttccgccacttatgaaatcaaatttcacgagtttgtgctgttcattctcgaagaaaaaatgggtgcgacgcgtcgtacttttctgacagatttagcccgcaagaaagggttccgcgtcgagaatgaactgaccgacgaagttacccacatcgtggcagaaaatctgtcacgctctgaagtattggcttggctgaaagaacacaagatggagaagaccaagcaattcgaactgctggatattagctggcttatcgaaagcatgaaagttggtaaaccggtggacaccaaggggaaataccagttggcggaatcggttgaggtgagtgcgaacccagatccgacagaaggtcgtgtaaacgagctgcctcctactatgaaaaccgtttctccgtatgcgtgtcaacgccgcaccaccctgaacaaccgtaatcaacgttttacggacgggctggagattcttcgcgagaattacgtgtttaaaggcaacgacgatactgcgctggaatttcgtcgtgctatctccgtgctgaaaagccttccgtttgaggtacgtagcctgaaagacacggaaggattgccctggatcagtgatgaagtcaaagggattatggaagaaatcatcgaagtcggggagtcgcgtgaagtgcaggccgtgctcaatgatgagtggtatcaaagcttccacgcatttacgcgtgtctttggagtgggggtaggcacagcagacaagtggtaccagatgggtctgcgcaccctggaggatgttcgttccagcaagaccctgaagttgaccacgtgggcgaaagtaggtctgacgtattatgaagatcttgctcgcggcgttacccgtgcggaagctgacgcgatttggctgctggttcaggatgcagtcgcaactttcgacccggatgcgatcgtggagattgtcggtggacagcgtcgtgggaaacctcagtctcacgacgttgatctgcttatcagttctccgggagctgaaaaagagcaagaagaccaactcctgcagaaagtgatgaatctgtggaagaaacaagggttgttgctgtgtggtaaagtggtgtggagtcagtgggaatgggggggtctgccgtccggtaaggctgatgagggtgacggggaggcatcgtgctttctgatcctcaaactttatgatcatctggtgcgtaaaagtaaacataatatgccgactggttcgaacatgggcgagtccaaaccgtggaaagcaattaaagtagatctgctgcgttgcccccgcggcagttttgcgtttgcgatgttgcagtggaccggaagccgcatgttccgtcgcgatctgcgcgattacgcccgcgaagagaagaacatgatgctggacaatcatagcctgtatgacatgactcgtggtatccaactccctgctaaatcggaagaggaaattttcgaacatctggggcttgaatacctggaaccgttctatcgtaacgca

SEQ ID NO: 5382 - protein, 529 aa, synthetic construct
  REGION 1..529: note = Variant of terminal deoxynucleotidyltransferase
MHHHHHHGGSGSHGIRTIDSDFGKKQQKKGDNHDSSATYEIKFHEFVLFILEEKMGATRRTFLTDLARKKGFRVENELTDEVTHIVAENLSRSEVLAWLKEHKMEKTKQFELLDISWLIESMKVGKPVDTKGKYQLAESVEVSANPDPTEGRVNELPPTMKTVSPYACQRRTTLNNRNQRFTDGLEILRENYVFKGNDDTALEFRRAISVLKSLPFEVRSLKDTEGLPWISDEVKGIMEEIIEVGESREVQAVLNDEWYQSFHAFTRVFGVGVGTADKWYQMGLRTLEDVRSSKTLKLTTWAKVGLTYYEDLARGVTRAEADAIWLLVQDAVATFDPDAIVEIVGGQRRGKPQSHDVDLLISSPGAEKEQEDQLLQKVMNLWKKQGLLLCGKVVWSQWEWGGLPSGKADEGDGEASCFLILKLYDHLVRKSKHNMPTGSNMGESKPWKAIKVDLLRCPRGSFAFAMLQWTGSRMFRRDLRDYAREEKNMMLDNHSLYDMTRGIQLPAKSEEEIFEHLGLEYLEPFYRNA

SEQ ID NO: 5383 - DNA, 1587 bp, synthetic construct
  misc_feature 1..1587: note = Variant of terminal deoxynucleotidyltransferase
  source 1..1587: mol_type = other DNA
atgcaccatcatcatcatcatggcggtagcggcagccacggcattcgtaccatcgattcggacttcgggaagaaacagcagaaaaaaggcgataaccacgatagttccgccacttatgaaatcaaatttcacgagtttgtgctgttcattctcgaagaaaaaatgggtgcgacgcgtcgtacttttctgacagatttagcccgcaagaaagggttccgcgtcgagaatgaactgaccgacgaagttacccacatcgtggcagaaaatctgtcacgctctgaagtattggcttggctgaaagaacacaagatggagaagaccaagcaattcgaactgctggatattagctggcttatcgaaagcatgaaagttggtaaaccggtggacaccaaggggaaataccagttggcggaatcggttgaggtgagtgcgaacccagatccgacagaaggtcgtgtaaacgagctgcctcctactatgaaaaccgtttctccgtatgcgtgtcaacgccgcaccaccctgaacaactggaatcaacgttttacggactcgctggagattcttcgcgagaattacgtgtttaaaggcaacgacgatactgcgctggaatttcgtcgtgctatctccgtgctgaaaagccttccgtttgaggtacgtagcctgaaagacacggaaggattgccctggatcagtgatgaagtcaaagggattatggaagaaatcatcgaagtcggggagtcgcgtgaagtgcaggccgtgctcaatgatgagtggtatcaaagcttccacgcatttacgcgtgtctttggagtgggggtaggcacagcagacaagtggtaccagatgggtctgcgcaccctggaggatgttcgttccagcaagaccctgaagttgaccacgtgggcgaaagtaggtctgacgtattatgaagatcttgctcgcggcgttacccgtgcggaagctgacgcgatttggctgctggttcaggatgcagtcgcaactttcgacccggatgcgatcgtggagattgtcggtggacagcgtcgtgggaaacctcagtctcacgacgttgatctgcttatcagttctccgggagctgaaaaagagcaagaagaccaactcctgcagaaagtgatgaatctgtggaagaaacaagggttgttgctgtgtggtaaagtggtgtggagtcagtgggaatgggggggtctgccgtccggtaaggctgatgagggtgacggggaggcatcgtgctttctgatcctcaaactttatgatcatctggtgcgtaaaagtaaacataatatgccgactggttcgaacatgggcgagtccaaaccgtggaaagcaattaaagtagatctgctgcgttgcccccgcggcagttttgcgtttgcgatgttgcagtggaccggaagccgcatgttccgtcgcgatctgcgcgattacgcccgcgaagagaagaacatgatgctggacaatcatagcctgtatgacatgactcgtggtatccaactccctgctaaatcggaagaggaaattttcgaacatctggggcttgaatacctggaaccgttctatcgtaacgca

SEQ ID NO: 5384 - protein, 529 aa, synthetic construct
  REGION 1..529: note = Variant of terminal deoxynucleotidyltransferase
MHHHHHHGGSGSHGIRTIDSDFGKKQQKKGDNHDSSATYEIKFHEFVLFILEEKMGATRRTFLTDLARKKGFRVENELTDEVTHIVAENLSRSEVLAWLKEHKMEKTKQFELLDISWLIESMKVGKPVDTKGKYQLAESVEVSANPDPTEGRVNELPPTMKTVSPYACQRRTTLNNWNQRFTDSLEILRENYVFKGNDDTALEFRRAISVLKSLPFEVRSLKDTEGLPWISDEVKGIMEEIIEVGESREVQAVLNDEWYQSFHAFTRVFGVGVGTADKWYQMGLRTLEDVRSSKTLKLTTWAKVGLTYYEDLARGVTRAEADAIWLLVQDAVATFDPDAIVEIVGGQRRGKPQSHDVDLLISSPGAEKEQEDQLLQKVMNLWKKQGLLLCGKVVWSQWEWGGLPSGKADEGDGEASCFLILKLYDHLVRKSKHNMPTGSNMGESKPWKAIKVDLLRCPRGSFAFAMLQWTGSRMFRRDLRDYAREEKNMMLDNHSLYDMTRGIQLPAKSEEEIFEHLGLEYLEPFYRNA

SEQ ID NO: 5385 - DNA, 1587 bp, synthetic construct
  misc_feature 1..1587: note = Variant of terminal deoxynucleotidyltransferase
  source 1..1587: mol_type = other DNA
atgcaccatcatcatcatcatggcggtagcggcagccacggcattcgtaccatcgattcggacttcgggaagaaacagcagaaaaaaggcgataaccacgatagttccgccacttatgaaatcaaatttcacgagtttgtgctgttcattctcgaagaaaaaatgggtgcgacgcgtcgtacttttctgacagatttagcccgcaagaaagggttccgcgtcgagaatgaactgaccgacgaagttacccacatcgtggcagaaaatctgtcacgctctgaagtattggcttggctgaaagaacacaagatggagaagaccaagcaattcgaactgctggatattagctggcttatcgaaagcatgaaagttggtaaaccggtggacaccaaggggaaataccagttggcggaatcggttgaggtgagtgcgaacccagatccgacagaaggtcgtgtaaacgagctgcctcctactatgaaaaccgtttctccgtatgcgtgtcaacgccgcaccaccctgaacaaccgtaatcaacgttttacggactcgctggagattcttcgcgagaattacgtgtttaaaggcaacgacgatactgcgctggaatttcgtcgtgctatctccgtgctgaaaagccttccgtttgaggtacgtagcctgaaagacacggaaggattgccctggatcagtgatgaagtcaaagggattatggaagaaatcatcgaagtcggggagtcgcgtgaagtgcaggccgtgctcaatgatgagtggtatcaaagcttccacgcatttacgcgtgtctttggagtgggggtaggcacagcagacaagtggtaccagatgggtctgcgcaccctggaggatgttcgtatgagcaagaccctgaagttgaccacgtgggcgaaagtaggtctgacgtattatgaagatcttgctcgcggcgttacccgtgcggaagctgacgcgatttggctgctggttcaggatgcagtcgcaactttcgacccggatgcgatcgtggagattgtcggtggacagcgtcgtgggaaacctcagtctcacgacgttgatctgcttatcagttctccgggagctgaaaaagagcaagaagaccaactcctgcagaaagtgatgaatctgtggaagaaacaagggttgttgctgtgtggtaaagtggtgtggagtcagtgggaatgggggggtctgccgtccggtaaggctgatgagggtgacggggaggcatcgtgctttctgatcctcaaactttatgatcatctggtgcgtaaaagtaaacataatatgccgactggttcgaacatgggcgagtccaaaccgtggaaagcaattaaagtagatctgctgcgttgcccccgcggcagttttgcgtttgcgatgttgcagtggaccggaagccgcatgttccgtcgcgatctgcgcgattacgcccgcgaagagaagaacatgatgctggacaatcatagcctgtatgacatgactcgtggtatccaactccctgctaaatcggaagaggaaattttcgaacatctggggcttgaatacctggaaccgttctatcgtaacgca

SEQ ID NO: 5386 - protein, 529 aa, synthetic construct
  REGION 1..529: note = Variant of terminal deoxynucleotidyltransferase
MHHHHHHGGSGSHGIRTIDSDFGKKQQKKGDNHDSSATYEIKFHEFVLFILEEKMGATRRTFLTDLARKKGFRVENELTDEVTHIVAENLSRSEVLAWLKEHKMEKTKQFELLDISWLIESMKVGKPVDTKGKYQLAESVEVSANPDPTEGRVNELPPTMKTVSPYACQRRTTLNNRNQRFTDSLEILRENYVFKGNDDTALEFRRAISVLKSLPFEVRSLKDTEGLPWISDEVKGIMEEIIEVGESREVQAVLNDEWYQSFHAFTRVFGVGVGTADKWYQMGLRTLEDVRMSKTLKLTTWAKVGLTYYEDLARGVTRAEADAIWLLVQDAVATFDPDAIVEIVGGQRRGKPQSHDVDLLISSPGAEKEQEDQLLQKVMNLWKKQGLLLCGKVVWSQWEWGGLPSGKADEGDGEASCFLILKLYDHLVRKSKHNMPTGSNMGESKPWKAIKVDLLRCPRGSFAFAMLQWTGSRMFRRDLRDYAREEKNMMLDNHSLYDMTRGIQLPAKSEEEIFEHLGLEYLEPFYRNA

SEQ ID NO: 5387 - DNA, 1587 bp, synthetic construct
  misc_feature 1..1587: note = Variant of terminal deoxynucleotidyltransferase
  source 1..1587: mol_type = other DNA
atgcaccatcatcatcatcatggcggtagcggcagccacggcattcgtaccatcgattcggacttcgggaagaaacagcagaaaaaaggcgataaccacgatagttccgccacttatgaaatcaaatttcacgagtttgtgctgttcattctcgaagaaaaaatgggtgcgacgcgtcgtacttttctgacagatttagcccgcaagaaagggttccgcgtcgagaatgaactgaccgacgaagttacccacatcgtggcagaaaatctgtcacgctctgaagtattggcttggctgaaagaacacaagatggagaagaccaagcaattcgaactgctggatattagctggcttatcgaaagcatgaaagttggtaaaccggtggacaccaaggggaaataccagttggcggaatcggttgaggtgagtgcgaacccagatccgacagaaggtcgtgtaaacgagctgcctcctactatgaaaaccgtttctccgtatgcgtgtcaacgccgcaccaccctgaacaaccgtaatcaacgttttacggactcgctggagattcttcgcgagaattacgtgtttaaaggcaacgacgatactgcgctggaatttcgtcgtgctatctccgtgctgaaaagccttccgtttgaggtacgtagcctgaaagacacggaaggattgccctggatcagtgatgaagtcaaagggattatggaagaaatcatcgaagtcggggagtcgcgtgaagtgcaggccgtgctcaatgatgagtggtatcaaagcttccacgcatttacgcgtgtctttggagtgggggtaggcacagcagacaagtggtaccagatgggtctgcgcaccctggaggatgttcgtcagagcaagaccctgaagttgaccacgtgggcgaaagtaggtctgacgtattatgaagatcttgctcgcggcgttacccgtgcggaagctgacgcgatttggctgctggttcaggatgcagtcgcaactttcgacccggatgcgatcgtggagattgtcggtggacagcgtcgtgggaaacctcagtctcacgacgttgatctgcttatcagttctccgggagctgaaaaagagcaagaagaccaactcctgcagaaagtgatgaatctgtggaagaaacaagggttgttgctgtgtggtaaagtggtgtggagtcagtgggaatgggggggtctgccgtccggtaaggctgatgagggtgacggggaggcatcgtgctttctgatcctcaaactttatgatcatctggtgcgtaaaagtaaacataatatgccgactggttcgaacatgggcgagtccaaaccgtggaaagcaattaaagtagatctgctgcgttgcccccgcggcagttttgcgtttgcgatgttgcagtggaccggaagccgcatgttccgtcgcgatctgcgcgattacgcccgcgaagagaagaacatgatgctggacaatcatagcctgtatgacatgactcgtggtatccaactccctgctaaatcggaagaggaaattttcgaacatctggggcttgaatacctggaaccgttctatcgtaacgca

SEQ ID NO: 5388 - protein, 529 aa, synthetic construct
  REGION 1..529: note = Variant of terminal deoxynucleotidyltransferase
MHHHHHHGGSGSHGIRTIDSDFGKKQQKKGDNHDSSATYEIKFHEFVLFILEEKMGATRRTFLTDLARKKGFRVENELTDEVTHIVAENLSRSEVLAWLKEHKMEKTKQFELLDISWLIESMKVGKPVDTKGKYQLAESVEVSANPDPTEGRVNELPPTMKTVSPYACQRRTTLNNRNQRFTDSLEILRENYVFKGNDDTALEFRRAISVLKSLPFEVRSLKDTEGLPWISDEVKGIMEEIIEVGESREVQAVLNDEWYQSFHAFTRVFGVGVGTADKWYQMGLRTLEDVRQSKTLKLTTWAKVGLTYYEDLARGVTRAEADAIWLLVQDAVATFDPDAIVEIVGGQRRGKPQSHDVDLLISSPGAEKEQEDQLLQKVMNLWKKQGLLLCGKVVWSQWEWGGLPSGKADEGDGEASCFLILKLYDHLVRKSKHNMPTGSNMGESKPWKAIKVDLLRCPRGSFAFAMLQWTGSRMFRRDLRDYAREEKNMMLDNHSLYDMTRGIQLPAKSEEEIFEHLGLEYLEPFYRNA

SEQ ID NO: 5389 - DNA, 1587 bp, synthetic construct
  misc_feature 1..1587: note = Variant of terminal deoxynucleotidyltransferase
  source 1..1587: mol_type = other DNA
atgcaccatcatcatcatcatggcggtagcggcagccacggcattcgtaccatcgattcggacttcgggaagaaacagcagaaaaaaggcgataaccacgatagttccgccacttatgaaatcaaatttcacgagtttgtgctgttcattctcgaagaaaaaatgggtgcgacgcgtcgtacttttctgacagatttagcccgcaagaaagggttccgcgtcgagaatgaactgaccgacgaagttacccacatcgtggcagaaaatctgtcacgctctgaagtattggcttggctgaaagaacacaagatggagaagaccaagcaattcgaactgctggatattagctggcttatcgaaagcatgaaagttggtaaaccggtggacaccaaggggaaataccagttggcggaatcggttgaggtgagtgcgaacccagatccgacagaaggtcgtgtaaacgagctgcctcctactatgaaaaccgtttctccgtatgcgtgtcaacgccgcaccaccctgaacaaccgtaatcaacgttttacggacccgctggagattcttcgcgagaattacgtgtttaaaggcaacgacgatactgcgctggaatttcgtcgtgctatctccgtgctgaaaagccttccgtttgaggtacgtagcctgaaagacacggaaggattgccctggatcagtgatgaagtcaaagggattatggaagaaatcatcgaagtcggggagtcgcgtgaagtgcaggccgtgctcaatgatgagtggtatcaaagcttccacgcatttacgcgtgtctttggagtgggggtaggcacagcagacaagtggtaccagatgggtctgcgcaccctggaggatgttcgttccagcaagaccctgaagttgaccacgtgggcgaaagtaggtctgacgtattatgaagatcttgctcgcggcgttacccgtgcggaagctgacgcgatttggctgctggttcaggatgcagtcgcaactttcgacccggatgcgatcgtggagattgtcggtggacagcgtcgtgggaaacctcagtctcacgacgttgatctgcttatcagttctccgggagctgaaaaagagcaagaagaccaactcctgcagaaagtgatgaatctgtggaagaaacaagggttgttgctgtgtggtaaagtggtgtggagtcagtgggaatgggggggtctgccgtccggtaaggctgatgagggtgacggggaggcatcgtgctttctgatcctcaaactttatgatcatctggtgcgtaaaagtaaacataatatgccgactggttcgaacatgggcgagtccaaaccgtggaaagcaattaaagtagatctgctgcgttgcccccgcggcagttttgcgtttgcgatgttgcagtggaccggaagccgcatgttccgtcgcgatctgcgcgattacgcccgcgaagagaagaacatgatgctggacaatcatagcctgtatgacatgactcgtggtatccaactccctgctaaatcggaagaggaaattttcgaacatctggggcttgaatacctggaaccgttctatcgtaacgca

SEQ ID NO: 5390 - protein, 529 aa, synthetic construct
  REGION 1..529: note = Variant of terminal deoxynucleotidyltransferase
MHHHHHHGGSGSHGIRTIDSDFGKKQQKKGDNHDSSATYEIKFHEFVLFILEEKMGATRRTFLTDLARKKGFRVENELTDEVTHIVAENLSRSEVLAWLKEHKMEKTKQFELLDISWLIESMKVGKPVDTKGKYQLAESVEVSANPDPTEGRVNELPPTMKTVSPYACQRRTTLNNRNQRFTDPLEILRENYVFKGNDDTALEFRRAISVLKSLPFEVRSLKDTEGLPWISDEVKGIMEEIIEVGESREVQAVLNDEWYQSFHAFTRVFGVGVGTADKWYQMGLRTLEDVRSSKTLKLTTWAKVGLTYYEDLARGVTRAEADAIWLLVQDAVATFDPDAIVEIVGGQRRGKPQSHDVDLLISSPGAEKEQEDQLLQKVMNLWKKQGLLLCGKVVWSQWEWGGLPSGKADEGDGEASCFLILKLYDHLVRKSKHNMPTGSNMGESKPWKAIKVDLLRCPRGSFAFAMLQWTGSRMFRRDLRDYAREEKNMMLDNHSLYDMTRGIQLPAKSEEEIFEHLGLEYLEPFYRNA

SEQ ID NO: 5391 - DNA, 1587 bp, synthetic construct
  misc_feature 1..1587: note = Variant of terminal deoxynucleotidyltransferase
  source 1..1587: mol_type = other DNA
atgcaccatcatcatcatcatggcggtagcggcagccacggcattcgtaccatcgattcggacttcgggaagaaacagcagaaaaaaggcgataaccacgatagttccgccacttatgaaatcaaatttcacgagtttgtgctgttcattctcgaagaaaaaatgggtgcgacgcgtcgtacttttctgacagatttagcccgcaagaaagggttccgcgtcgagaatgaactgaccgacgaagttacccacatcgtggcagaaaatctgtcacgctctgaagtattggcttggctgaaagaacacaagatggagaagaccaagcaattcgaactgctggatattagctggcttatcgaaagcatgaaagttggtaaaccggtggacaccaaggggaaataccagttggcggaatcggttgaggtgagtgcgaacccagatccgacagaaggtcgtgtaaacgagctgcctcctactatgaaaaccgtttctccgtatgcgtgtcaacgccgcaccaccctgaacaaccgtaatcaacgttttacggactcgctggagattcttcgcgagaattacgtgtttaaaggcaacgacgatactgcgctggaatttcgtcgtgctatctccgtgctgaaaagccttccgtttgaggtacgtagcctgaaagacacggaaggattgccctggatcagtgatgaagtcaaagggattatggaagaaatcatcgaagtcggggagtcgcgtgaagtgcaggccgtgctcaatgatgagtggtatcaaagcttccacgcatttacgcgtgtctttggagtgggggtaggcacagcagacaagtggtaccagatgggtctgcgcaccctggaggatgttcgtcggagcaagaccctgaagttgaccacgtgggcgaaagtaggtctgacgtattatgaagatcttgctcgcggcgttacccgtgcggaagctgacgcgatttggctgctggttcaggatgcagtcgcaactttcgacccggatgcgatcgtggagattgtcggtggacagcgtcgtgggaaacctcagtctcacgacgttgatctgcttatcagttctccgggagctgaaaaagagcaagaagaccaactcctgcagaaagtgatgaatctgtggaagaaacaagggttgttgctgtgtggtaaagtggtgtggagtcagtgggaatgggggggtctgccgtccggtaaggctgatgagggtgacggggaggcatcgtgctttctgatcctcaaactttatgatcatctggtgcgtaaaagtaaacataatatgccgactggttcgaacatgggcgagtccaaaccgtggaaagcaattaaagtagatctgctgcgttgcccccgcggcagttttgcgtttgcgatgttgcagtggaccggaagccgcatgttccgtcgcgatctgcgcgattacgcccgcgaagagaagaacatgatgctggacaatcatagcctgtatgacatgactcgtggtatccaactccctgctaaatcggaagaggaaattttcgaacatctggggcttgaatacctggaaccgttctatcgtaacgca

SEQ ID NO: 5392 - protein, 529 aa, synthetic construct
  REGION 1..529: note = Variant of terminal deoxynucleotidyltransferase
MHHHHHHGGSGSHGIRTIDSDFGKKQQKKGDNHDSSATYEIKFHEFVLFILEEKMGATRRTFLTDLARKKGFRVENELTDEVTHIVAENLSRSEVLAWLKEHKMEKTKQFELLDISWLIESMKVGKPVDTKGKYQLAESVEVSANPDPTEGRVNELPPTMKTVSPYACQRRTTLNNRNQRFTDSLEILRENYVFKGNDDTALEFRRAISVLKSLPFEVRSLKDTEGLPWISDEVKGIMEEIIEVGESREVQAVLNDEWYQSFHAFTRVFGVGVGTADKWYQMGLRTLEDVRRSKTLKLTTWAKVGLTYYEDLARGVTRAEADAIWLLVQDAVATFDPDAIVEIVGGQRRGKPQSHDVDLLISSPGAEKEQEDQLLQKVMNLWKKQGLLLCGKVVWSQWEWGGLPSGKADEGDGEASCFLILKLYDHLVRKSKHNMPTGSNMGESKPWKAIKVDLLRCPRGSFAFAMLQWTGSRMFRRDLRDYAREEKNMMLDNHSLYDMTRGIQLPAKSEEEIFEHLGLEYLEPFYRNA

SEQ ID NO: 5393 - DNA, 1587 bp, synthetic construct
  misc_feature 1..1587: note = Variant of terminal deoxynucleotidyltransferase
  source 1..1587: mol_type = other DNA
atgcaccatcatcatcatcatggcggtagcggcagccacggcattcgtaccatcgattcggacttcgggaagaaacagcagaaaaaaggcgataaccacgatagttccgccacttatgaaatcaaatttcacgagtttgtgctgttcattctcgaagaaaaaatgggtgcgacgcgtcgtacttttctgacagatttagcccgcaagaaagggttccgcgtcgagaatgaactgaccgacgaagttacccacatcgtggcagaaaatctgtcacgctctgaagtattggcttggctgaaagaacacaagatggagaagaccaagcaattcgaactgctggatattagctggcttatcgaaagcatgaaagttggtaaaccggtggacaccaaggggaaataccagttggcggaatcggttgaggtgagtgcgaacccagatccgacagaaggtcgtgtaaacgagctgcctcctactatgaaaaccgtttctccgtatgcgtgtcaacgccgcaccaccctgaacaaccgtaatcaacgttttacggactcgctggagattcttcgcgagaattacgtgtttaaaggcatggacgatactgcgctggaatttcgtcgtgctatctccgtgctgaaaagccttccgtttgaggtacgtagcctgaaagacacggaaggattgccctggatcagtgatgaagtcaaagggattatggaagaaatcatcgaagtcggggagtcgcgtgaagtgcaggccgtgctcaatgatgagtggtatcaaagcttccacgcatttacgcgtgtctttggagtgggggtaggcacagcagacaagtggtaccagatgggtctgcgcaccctggaggatgttcgttccagcaagaccctgaagttgaccacgtgggcgaaagtaggtctggcgtattatgaagatcttgctcgcggcgttacccgtgcggaagctgacgcgatttggctgctggttcaggatgcagtcgcaactttcgacccggatgcgatcgtggagattgtcggtggacagcgtcgtgggaaacctcagtctcacgacgttgatctgcttatcagttctccgggagctgaaaaagagcaagaagaccaactcctgcagaaagtgatgaatctgtggaagaaacaagggttgttgctgtgtggtaaagtggtgtggagtcagtgggaatgggggggtctgccgtccggtaaggctgatgagggtgacggggaggcatcgtgctttctgatcctcaaactttatgatcatctggtgcgtaaaagtaaacataatatgccgactggttcgaacatgggcgagtccaaaccgtggaaagcaattaaagtagatctgctgcgttgcccccgcggcagttttgcgtttgcgatgttgcagtggaccggaagccgcatgttccgtcgcgatctgcgcgattacgcccgcgaagagaagaacatgatgctggacaatcatagcctgtatgacatgactcgtggtatccaactccctgctaaatcggaagaggaaattttcgaacatctggggcttgaatacctggaaccgttctatcgtaacgca

SEQ ID NO: 5394 - protein, 529 aa, synthetic construct
  REGION 1..529: note = Variant of terminal deoxynucleotidyltransferase
MHHHHHHGGSGSHGIRTIDSDFGKKQQKKGDNHDSSATYEIKFHEFVLFILEEKMGATRRTFLTDLARKKGFRVENELTDEVTHIVAENLSRSEVLAWLKEHKMEKTKQFELLDISWLIESMKVGKPVDTKGKYQLAESVEVSANPDPTEGRVNELPPTMKTVSPYACQRRTTLNNRNQRFTDSLEILRENYVFKGMDDTALEFRRAISVLKSLPFEVRSLKDTEGLPWISDEVKGIMEEIIEVGESREVQAVLNDEWYQSFHAFTRVFGVGVGTADKWYQMGLRTLEDVRSSKTLKLTTWAKVGLAYYEDLARGVTRAEADAIWLLVQDAVATFDPDAIVEIVGGQRRGKPQSHDVDLLISSPGAEKEQEDQLLQKVMNLWKKQGLLLCGKVVWSQWEWGGLPSGKADEGDGEASCFLILKLYDHLVRKSKHNMPTGSNMGESKPWKAIKVDLLRCPRGSFAFAMLQWTGSRMFRRDLRDYAREEKNMMLDNHSLYDMTRGIQLPAKSEEEIFEHLGLEYLEPFYRNA

SEQ ID NO: 5395 - DNA, 1587 bp, synthetic construct
  misc_feature 1..1587: note = Variant of terminal deoxynucleotidyltransferase
  source 1..1587: mol_type = other DNA
atgcaccatcatcatcatcatggcggtagcggcagccacggcattcgtaccatcgattcggacttcgggaagaaacagcagaaaaaaggcgataaccacgatagttccgccacttatgaaatcaaatttcacgagtttgtgctgttcattctcgaagaaaaaatgggtgcgacgcgtcgtacttttctgacagatttagcccgcaagaaagggttccgcgtcgagaatgaactgaccgacgaagttacccacatcgtggcagaaaatctgtcacgctctgaagtattggcttggctgaaagaacacaagatggagaagaccaagcaattcgaactgctggatattagctggcttatcgaaagcatgaaagttggtaaaccggtggacaccaaggggaaataccagttggcggaatcggttgaggtgagtgcgaacccagatccgacagaaggtcgtgtaaacgagctgcctcctactatgaaaaccgtttctccgtatgcgtgtcaacgccgcaccaccctgaacaaccgtaatcaacgttttacggactcgctggagattcttcgcgagaattacgtgtttaaaggcaacgacgatactgcgctggaatttcgtcgtgctatctccgtgctgaaaagccttccgtttgaggtacgtagcctgaaagacacggaaggattgccctggatcagtgatgaagtcaaagggattatggaagaaatcatcgaagtcggggagtcgcgtgaagtgcaggccgtgctcaatgatgagtggtatcaaagcttccacgcatttacgcgtgtctttggagtgggggtaggcacagcagacaagtggtaccagatgggtctgcgcaccctggaggatgttcgttccagcaagaccctgaagttgaccacgtgggcgaaagtaggtctgacgtattatgaagatcttgctcgcggcgttacccgtgcggaagctgacgcgatttggctgctggttcaggatgcagtcgcaactttcgacccggatgcgatcgtggagattgtcggtggacagcgtcgtgggaaacctcagtctcacgacgttgatctgcttatcagttctccgggagctgaaaaagagcaagaagaccaactcctgcagaatgtgatgaatctgtggaagaaacaagggttgttgctgtgtggtaaagtggtgtggagtcagtgggaatgggggggtctgccgtccggtaaggctgatgagggtgacggggaggcatcgtgctttctgatcctcaaactttatgatcatctggtgcgtaaaagtaaacataatatgccgactggttcgaacatgggcgagtccaaaccgtggaaagcaattaaagtagatctgctgcgttgcccccgcggcagttttgcgtttgcgatgttgcagtggaccggaagccgcatgttccgtcgcgatctgcgcgattacgcccgcgaagagaagaacatgatgctggacaatcatagcctgtatgacatgactcgtggtatccaactccctgctaaatcggaagaggaaattttcgaacatctggggcttgaatacctggaaccgttctatcgtaacgca

SEQ ID NO: 5396 - protein, 529 aa, synthetic construct
  REGION 1..529: note = Variant of terminal deoxynucleotidyltransferase
MHHHHHHGGSGSHGIRTIDSDFGKKQQKKGDNHDSSATYEIKFHEFVLFILEEKMGATRRTFLTDLARKKGFRVENELTDEVTHIVAENLSRSEVLAWLKEHKMEKTKQFELLDISWLIESMKVGKPVDTKGKYQLAESVEVSANPDPTEGRVNELPPTMKTVSPYACQRRTTLNNRNQRFTDSLEILRENYVFKGNDDTALEFRRAISVLKSLPFEVRSLKDTEGLPWISDEVKGIMEEIIEVGESREVQAVLNDEWYQSFHAFTRVFGVGVGTADKWYQMGLRTLEDVRSSKTLKLTTWAKVGLTYYEDLARGVTRAEADAIWLLVQDAVATFDPDAIVEIVGGQRRGKPQSHDVDLLISSPGAEKEQEDQLLQNVMNLWKKQGLLLCGKVVWSQWEWGGLPSGKADEGDGEASCFLILKLYDHLVRKSKHNMPTGSNMGESKPWKAIKVDLLRCPRGSFAFAMLQWTGSRMFRRDLRDYAREEKNMMLDNHSLYDMTRGIQLPAKSEEEIFEHLGLEYLEPFYRNA

SEQ ID NO: 5397 - DNA, 1587 bp, synthetic construct
  misc_feature 1..1587: note = Variant of terminal deoxynucleotidyltransferase
  source 1..1587: mol_type = other DNA
atgcaccatcatcatcatcatggcggtagcggcagccacggcattcgtaccatcgattcggacttcgggaagaaacagcagaaaaaaggcgataaccacgatagttccgccacttatgaaatcaaatttcacgagtttgtgctgttcattctcgaagaaaaaatgggtgcgacgcgtcgtacttttctgacagatttagcccgcaagaaagggttccgcgtcgagaatgaactgaccgacgaagttacccacatcgtggcagaaaatctgtcacgctctgaagtattggcttggctgaaagaacacaagatggagaagaccaagcaattcgaactgctggatattagctggcttatcgaaagcatgaaagttggtaaaccggtggacaccaaggggaaataccagttggcggaatcggttgaggtgagtgcgaacccagatccgacagaaggtcgtgtaaacgagctgcctcctactatgaaaaccgtttctccgtatgcgtgtcaacgccgcaccaccctgaacaaccgtaatcaacgttttacggactcgctggagattcttcgcgagaattacgtgtttaaaggcaacgacgatactgcgctggaatttcgtcgtgctatctccgtgctgaaaagccttccgtttgaggtacgtagcctgaaagacacggaaggattgccctggatcagtgatagggtcaaagggattatggaagaaatcatcgaagtcggggagtcgcgtgaagtgcaggccgtgctcaatgatgagtggtatcaaagcttccacgcatttacgcgtgtctttggagtgggggtaggcacagcagacaagtggtaccagatgggtctgcgcaccctggaggatgttcgttccagcaagaccctgaagttgaccacgtgggcgaaagtaggtctgacgtattatgaagatcttgctcgcggcgttacccgtgcggaagctgacgcgatttggctgctggttcaggatgcagtcgcaactttcgacccggatgcgatcgtggagattgtcggtggacagcgtcgtgggaaacctcagtctcacgacgttgatctgcttatcagttctccgggagctgaaaaagagcaagaagaccaactcctgcagaaagtgatgaatctgtggaagaaacaagggttgttgctgtgtggtaaagtgtattggagtcagtgggaatgggggggtctgccgtccggtaaggctgatgagggtgacggggaggcatcgtgctttctgatcctcaaactttatgatcatctggtgcgtaaaagtaaacataatatgccgactggttcgaacatgggcgagtccaaaccgtggaaagcaattaaagtagatctgctgcgttgcccccgcggcagttttgcgtttgcgatgttgcagtggaccggaagccgcatgttccgtcgcgatctgcgcgattacgcccgcgaagagaagaacatgatgctggacaatcatagcctgtatgacatgactcgtggtatccaactccctgctaaatcggaagaggaaattttcgaacatctggggcttgaatacctggaaccgttctatcgtaacgca

SEQ ID NO: 5398 - protein, 529 aa, synthetic construct
  REGION 1..529: note = Variant of terminal deoxynucleotidyltransferase
MHHHHHHGGSGSHGIRTIDSDFGKKQQKKGDNHDSSATYEIKFHEFVLFILEEKMGATRRTFLTDLARKKGFRVENELTDEVTHIVAENLSRSEVLAWLKEHKMEKTKQFELLDISWLIESMKVGKPVDTKGKYQLAESVEVSANPDPTEGRVNELPPTMKTVSPYACQRRTTLNNRNQRFTDSLEILRENYVFKGNDDTALEFRRAISVLKSLPFEVRSLKDTEGLPWISDRVKGIMEEIIEVGESREVQAVLNDEWYQSFHAFTRVFGVGVGTADKWYQMGLRTLEDVRSSKTLKLTTWAKVGLTYYEDLARGVTRAEADAIWLLVQDAVATFDPDAIVEIVGGQRRGKPQSHDVDLLISSPGAEKEQEDQLLQKVMNLWKKQGLLLCGKVYWSQWEWGGLPSGKADEGDGEASCFLILKLYDHLVRKSKHNMPTGSNMGESKPWKAIKVDLLRCPRGSFAFAMLQWTGSRMFRRDLRDYAREEKNMMLDNHSLYDMTRGIQLPAKSEEEIFEHLGLEYLEPFYRNA

SEQ ID NO: 5399 - DNA, 1587 bp, synthetic construct
  misc_feature 1..1587: note = Variant of terminal deoxynucleotidyltransferase
  source 1..1587: mol_type = other DNA
atgcaccatcatcatcatcatggcggtagcggcagccacggcattcgtaccatcgattcggacttcgggaagaaacagcagaaaaaaggcgataaccacgatagttccgccacttatgaaatcaaatttcacgagtttgtgctgttcattctcgaagaaaaaatgggtgcgacgcgtcgtacttttctgacagatttagcccgcaagaaagggttccgcgtcgagaatgaactgaccgacgaagttacccacatcgtggcagaaaatctgtcacgctctgaagtattggcttggctgaaagaacacaagatggagaagaccaagcaattcgaactgctggatattagctggcttatcgaaagcatgaaagttggtaaaccggtggacaccaaggggaaataccagttggcggaatcggttgaggtgagtgcgaacccagatccgacagaaggtcgtgtaaacgagctgcctcctactatgaaaaccgtttctccgtatgcgtgtcaacgccgcaccaccctgaacaaccgtaatcaacgttttacggactcgctggagattcttcgcgagaattacgtgtttaaaggcaacgacgatactgcgctggaatttcgtcgtgctatctccgtgctgaaaagccttccgtttgaggtacgtagcctgaaagacacggaaggattgccctggatcagtgatgaagtcaaagggattatggaagaaatcatcgaagtcggggagtcgcgtgaagtgcaggccgtgctcaatgatgagtggtatcaaagcttccacgcatttacgcgtgtctttggagtgggggtaggcacagcagacaagtggtaccagatgggtctgcgcaccctggaggatgttcgttccagcaagaccctgaagttgaccacgtgggcgaaagtaggtctgacgtattatgaagatcttgctcgcggcgttacccgtgcggaagctgacgcgatttggctgctggttcaggatgcagtcgcaactttcgacccggatgcgatcgtggagattgtcggtggacagcgtcgtgggaaacctcagtctcacgacgttgatctgcttatcagttctccgggagctgaaaaagagcaagaagaccaactcctgcagaaagtgatgaatctgtggaagaaacaagggttgttgctgtgtggtaaagtgtattggagtcagtgggaatgggggggtctgccgtccggtaaggctgatgagggtgacggggaggcatcgtgctttctgatcctcaaactttatgatcatctggtgcgtaaaagtaaacataatatgccgactggttcgaacatgggcgagtccaaaccgtggaaagcaattaaagtagatctgctgcgttgcccccgcggcagttttgcgtttgcgatgttgcagtggaccggaagccgcatgttccgtcgcgatctgcgcgattacgcccgcctggagaagaacatgatgctggacaatcatagcctgtatgacatgactcgtggtatccaactccctgctaaatcggaagaggaaattttcgaacatctggggcttgaatacctggaaccgttctatcgtaacgca

SEQ ID NO: 5400 - protein, 529 aa, synthetic construct
  REGION 1..529: note = Variant of terminal deoxynucleotidyltransferase
MHHHHHHGGSGSHGIRTIDSDFGKKQQKKGDNHDSSATYEIKFHEFVLFILEEKMGATRRTFLTDLARKKGFRVENELTDEVTHIVAENLSRSEVLAWLKEHKMEKTKQFELLDISWLIESMKVGKPVDTKGKYQLAESVEVSANPDPTEGRVNELPPTMKTVSPYACQRRTTLNNRNQRFTDSLEILRENYVFKGNDDTALEFRRAISVLKSLPFEVRSLKDTEGLPWISDEVKGIMEEIIEVGESREVQAVLNDEWYQSFHAFTRVFGVGVGTADKWYQMGLRTLEDVRSSKTLKLTTWAKVGLTYYEDLARGVTRAEADAIWLLVQDAVATFDPDAIVEIVGGQRRGKPQSHDVDLLISSPGAEKEQEDQLLQKVMNLWKKQGLLLCGKVYWSQWEWGGLPSGKADEGDGEASCFLILKLYDHLVRKSKHNMPTGSNMGESKPWKAIKVDLLRCPRGSFAFAMLQWTGSRMFRRDLRDYARLEKNMMLDNHSLYDMTRGIQLPAKSEEEIFEHLGLEYLEPFYRNA

SEQ ID NO: 5401 - DNA, 1587 bp, synthetic construct
  misc_feature 1..1587: note = Variant of terminal deoxynucleotidyltransferase
  source 1..1587: mol_type = other DNA
atgcaccatcatcatcatcatggcggtagcggcagccacggcattcgtaccatcgattcggacttcgggaagaaacagcagaaaaaaggcgataaccacgatagttccgccacttatgaaatcaaatttcacgagtttgtgctgttcattctcgaagaaaaaatgggtgcgacgcgtcgtacttttctgacagatttagcccgcaagaaagggttccgcgtcgagaatgaactgaccgacgaagttacccacatcgtggcagaaaatctgtcacgctctgaagtattggcttggctgaaagaacacaagatggagaagaccaagcaattcgaactgctggatattagctggcttatcgaaagcatgaaagttggtaaaccggtggacaccaaggggaaataccagttggcggaatcggttgaggtgagtgcgaacccagatccgacagaaggtcgtgtaaacgagctgcctcctactatgaaaaccgtttctccgtatgcgtgtcaacgccgcaccaccctgaacaaccgtaatcaacgttttacggactcgctggagattcttcgcgagaattacgtgtttaaaggcaacgacgatactgcgctggaatttcgtcgtgctatctccgtgctgaaaagccttccgtttgaggtacgtagcctgaaagacacggaaggattgccctggatcagtgatgaagtcaaagggattatggaagaaatcatcgaagtcggggagtcgcgtgaagtgcaggccgtgctcaatgatgagtggtatcaaagcttccacgcatttacgcgtgtctttggagtgggggtaggcacagcagacaagtggtaccagatgggtctgcgcaccctggaggatgttcgttccagcaagaccctgaagttgaccacgtgggcgaaagtaggtctgacgtattatgaagatcttgctcgcggcgttacccgtgcggaagctgacgcgatttggctgctggttcaggatgcagtcgcaactttcgacccggatgcgatcgtggagattgtcggtggacagcgtcgtgggaaacctcagtctcacgacgttgatctgcttatcagttctccgggagctgaaaaagagcaagaagaccaactcctgcagaaagtgatgaatctgtggaagaaacaagggttgttgctgtgtggtaaagtgtattggagtcagtgggaatgggggggtctgccgtccggtaaggctgatgagggtgacggggaggcatcgtgctttctgatcctcaaactttatgatcatctggtgcgtaaaagtaaacataatatgccgactggttcgaacatgggcgagtccaaaccgtggaaagcaattaaagtagatctgctgcgttgcccgatgggcagttttgcgtttgcgatgttgcagtggaccggaagccgcatgttccgtcgcgatctgcgcgattacgcccgcgaagagaagaacatgatgctggacaatcatagcctgtatgacatgactcgtggtatccaactccctgctaaatcggaagaggaaattttcgaacatctggggcttgaatacctggaaccgttctatcgtaacgca

SEQ ID NO: 5402 - protein, 529 aa, synthetic construct
  REGION 1..529: note = Variant of terminal deoxynucleotidyltransferase
MHHHHHHGGSGSHGIRTIDSDFGKKQQKKGDNHDSSATYEIKFHEFVLFILEEKMGATRRTFLTDLARKKGFRVENELTDEVTHIVAENLSRSEVLAWLKEHKMEKTKQFELLDISWLIESMKVGKPVDTKGKYQLAESVEVSANPDPTEGRVNELPPTMKTVSPYACQRRTTLNNRNQRFTDSLEILRENYVFKGNDDTALEFRRAISVLKSLPFEVRSLKDTEGLPWISDEVKGIMEEIIEVGESREVQAVLNDEWYQSFHAFTRVFGVGVGTADKWYQMGLRTLEDVRSSKTLKLTTWAKVGLTYYEDLARGVTRAEADAIWLLVQDAVATFDPDAIVEIVGGQRRGKPQSHDVDLLISSPGAEKEQEDQLLQKVMNLWKKQGLLLCGKVYWSQWEWGGLPSGKADEGDGEASCFLILKLYDHLVRKSKHNMPTGSNMGESKPWKAIKVDLLRCPMGSFAFAMLQWTGSRMFRRDLRDYAREEKNMMLDNHSLYDMTRGIQLPAKSEEEIFEHLGLEYLEPFYRNA

SEQ ID NO: 5403 - DNA, 1587 bp, synthetic construct
  misc_feature 1..1587: note = Variant of terminal deoxynucleotidyltransferase
  source 1..1587: mol_type = other DNA
atgcaccatcatcatcatcatggcggtagcggcagccacggcattcgtaccatcgattcggacttcgggaagaaacagcagaaaaaaggcgataaccacgatagttccgccacttatgaaatcaaatttcacgagtttgtgctgttcattctcgaagaaaaaatgggtgcgacgcgtcgtacttttctgacagatttagcccgcaagaaagggttccgcgtcgagaatgaactgaccgacgaagttacccacatcgtggcagaaaatctgtcacgctctgaagtattggcttggctgaaagaacacaagatggagaagaccaagcaattcgaactgctggatattagctggcttatcgaaagcatgaaagttggtaaaccggtggacaccaaggggaaataccagttggcggaatcggttgaggtgagtgcgaacccagatccgacagaaggtcgtgtaaacgagctgcctcctactatgaaaaccgtttctccgtatgcgtgtcaacgccgcaccaccctgaacaaccgtaatcaacgttttacggactcgctggagattcttcgcgagaattacgtgtttaaaggcaacgacgatactgcgctggaatttcgtcgtgctatctccgtgctgaaaagccttccgtttgaggtacgtagcctgaaagacacggaaggattgccctggatcagtgatgaagtcaaagggattatggaagaaatcatcgaagtcggggagtcgcgtgaagtgcaggccgtgctcaatgatgagtggtatcaaagcttccacgcatttacgcgtgtctttggagtgggggtaggcacagcagacaagtggtaccagatgggtctgcgcaccctggaggatgttcgttccagcaagaccctgaagttgaccacgtgggcgaaagtaggtctgacgtattatgaagatcttgctcgcggcgttacccgtgcggaagctgacgcgatttggctgctggttcaggatgcagtcgcaactttcgacccggatgcgatcgtggagattgtcggtggacagcgtcgtgggaaacctcagtctcacgacgttgatctgcttatcagttctccgggagctgaaaaagagcaagaagaccaactcctgcagaaagtgatgaattattggaagaaacaagggttgttgctgtgtggtaaagtgtattggagtcagtgggaatgggggggtctgccgtccggtaaggctgatgagggtgacggggaggcatcgtgctttctgatcctcaaactttatgatcatctggtgcgtaaaagtaaacataatatgccgactggttcgaacatgggcgagtccaaaccgtggaaagcaattaaagtagatctgctgcgttgcccccgcggcagttttgcgtttgcgatgttgcagtggaccggaagccgcatgttccgtcgcgatctgcgcgattacgcccgcgaagagaagaacatgatgctggacaatcatagcctgtatgacatgactcgtggtatccaactccctgctaaatcggaagaggaaattttcgaacatctggggcttgaatacctggaaccgttctatcgtaacgca

SEQ ID NO: 5404 - protein, 529 aa, synthetic construct
  REGION 1..529: note = Variant of terminal deoxynucleotidyltransferase
MHHHHHHGGSGSHGIRTIDSDFGKKQQKKGDNHDSSATYEIKFHEFVLFILEEKMGATRRTFLTDLARKKGFRVENELTDEVTHIVAENLSRSEVLAWLKEHKMEKTKQFELLDISWLIESMKVGKPVDTKGKYQLAESVEVSANPDPTEGRVNELPPTMKTVSPYACQRRTTLNNRNQRFTDSLEILRENYVFKGNDDTALEFRRAISVLKSLPFEVRSLKDTEGLPWISDEVKGIMEEIIEVGESREVQAVLNDEWYQSFHAFTRVFGVGVGTADKWYQMGLRTLEDVRSSKTLKLTTWAKVGLTYYEDLARGVTRAEADAIWLLVQDAVATFDPDAIVEIVGGQRRGKPQSHDVDLLISSPGAEKEQEDQLLQKVMNYWKKQGLLLCGKVYWSQWEWGGLPSGKADEGDGEASCFLILKLYDHLVRKSKHNMPTGSNMGESKPWKAIKVDLLRCPRGSFAFAMLQWTGSRMFRRDLRDYAREEKNMMLDNHSLYDMTRGIQLPAKSEEEIFEHLGLEYLEPFYRNA

SEQ ID NO: 5405 - DNA, 1587 bp, synthetic construct
  misc_feature 1..1587: note = Variant of terminal deoxynucleotidyltransferase
  source 1..1587: mol_type = other DNA
atgcaccatcatcatcatcatggcggtagcggcagccacggcattcgtaccatcgattcggacttcgggaagaaacagcagaaaaaaggcgataaccacgatagttccgccacttatgaaatcaaatttcacgagtttgtgctgttcattctcgaagaaaaaatgggtgcgacgcgtcgtacttttctgacagatttagcccgcaagaaagggttccgcgtcgagaatgaactgaccgacgaagttacccacatcgtggcagaaaatctgtcacgctctgaagtattggcttggctgaaagaacacaagatggagaagaccaagcaattcgaactgctggatattagctggcttatcgaaagcatgaaagttggtaaaccggtggacaccaaggggaaataccagttggcggaatcggttgaggtgagtgcgaacccagatccgacagaaggtcgtgtaaacgagctgcctcctactatgaaaaccgtttctccgtatgcgtgtcaacgccgcaccaccctgaacaaccgtaatcaacgttttacggactcgctggagattcttcgcgagaattacgtgtttaaaggcaacgacgatactgcgctggaatttcgtcgtgctatctccgtgctgaaaagccttccgtttgaggtacgtagcctgaaagacacggaaggattgccctggatcagtgatgaagtcaaagggattatggaagaaatcatcgaagtcggggagtcgcgtgaagtgcaggccgtgctcaatgatgagtggtatcaaagcttccacgcatttacgcgtgtctttggagtgggggtaggcacagcagacaagtggtaccagatgggtctgcgcaccctggaggatgttcgttccagcaagaccctgaagttgaccacgtgggcgaaagtaggtctgacgtattatgaagatcttgctcgcggcgttacccgtgcggaagctgacgcgatttggctgctggttcaggatgcagtcgcaactttcgacccggatgcgatcgtggagattgtcggtggacagcgtcgtgggaaacctcagtctcacgacgttgatctgcttatcagttctccgcatgctgaaaaagagcaagaagaccaactcctgcagaaagtgatgaatctgtggaagaaacaagggttgttgctgtgtggtaaagtgtattggagtcagtgggaatgggggggtctgccgtccggtaaggctgatgagggtgacggggaggcatcgtgctttctgatcctcaaactttatgatcatctggtgcgtaaaagtaaacataatatgccgactggttcgaacatgggcgagtccaaaccgtggaaagcaattaaagtagatctgctgcgttgcccccgcggcagttttgcgtttgcgatgttgcagtggaccggaagccgcatgttccgtcgcgatctgcgcgattacgcccgcgaagagaagaacatgatgctggacaatcatagcctgtatgacatgactcgtggtatccaactccctgctaaatcggaagaggaaattttcgaacatctggggcttgaatacctggaaccgttctatcgtaacgca

SEQ ID NO: 5406 - protein, 529 aa, synthetic construct
  REGION 1..529: note = Variant of terminal deoxynucleotidyltransferase
MHHHHHHGGSGSHGIRTIDSDFGKKQQKKGDNHDSSATYEIKFHEFVLFILEEKMGATRRTFLTDLARKKGFRVENELTDEVTHIVAENLSRSEVLAWLKEHKMEKTKQFELLDISWLIESMKVGKPVDTKGKYQLAESVEVSANPDPTEGRVNELPPTMKTVSPYACQRRTTLNNRNQRFTDSLEILRENYVFKGNDDTALEFRRAISVLKSLPFEVRSLKDTEGLPWISDEVKGIMEEIIEVGESREVQAVLNDEWYQSFHAFTRVFGVGVGTADKWYQMGLRTLEDVRSSKTLKLTTWAKVGLTYYEDLARGVTRAEADAIWLLVQDAVATFDPDAIVEIVGGQRRGKPQSHDVDLLISSPHAEKEQEDQLLQKVMNLWKKQGLLLCGKVYWSQWEWGGLPSGKADEGDGEASCFLILKLYDHLVRKSKHNMPTGSNMGESKPWKAIKVDLLRCPRGSFAFAMLQWTGSRMFRRDLRDYAREEKNMMLDNHSLYDMTRGIQLPAKSEEEIFEHLGLEYLEPFYRNA

SEQ ID NO: 5407 - DNA, 1587 bp, synthetic construct
  misc_feature 1..1587: note = Variant of terminal deoxynucleotidyltransferase
  source 1..1587: mol_type = other DNA
atgcaccatcatcatcatcatggcggtagcggcagccacggcattcgtaccatcgattcggacttcgggaagaaacagcagaaaaaaggcgataaccacgatagttccgccacttatgaaatcaaatttcacgagtttgtgctgttcattctcgaagaaaaaatgggtgcgacgcgtcgtacttttctgacagatttagcccgcaagaaagggttccgcgtcgagaatgaactgaccgacgaagttacccacatcgtggcagaaaatctgtcacgctctgaagtattggcttggctgaaagaacacaagatggagaagaccaagcaattcgaactgctggatattagctggcttatcgaaagcatgaaagttggtaaaccggtggacaccaaggggaaataccagttggcggaatcggttgaggtgagtgcgaacccagatccgacagaaggtcgtgtaaacgagctgcctcctactatgaaaaccgtttctccgtatgcgtgtcaacgccgcaccaccctgaacaaccgtaatcaacgttttacggactcgctggagattcttcgcgagaattacgtgtttaaaggcaacgacgatactgcgctggaatttcgtcgtgctatctccgtgctgaaaagccttccgtttgaggtacgtagcctgaaagacacggaaggattgccctggatcagtgatgaagtcaaagggattatggaagaaatcatcgaagtcggggagtcgcgtgaagtgcaggccgtgctcaatgatgagtggtatcaaagcttccacgcatttacgcgtgtctttggagtgggggtaggcacagcagacaagtggtaccagatgggtctgcgcaccctggaggatgttcgttccagcaagaccctgaagttgaccacgtgggcgaaagtaggtctgacgtattatgaagatcttgctcgcggcgttacccgtgcggaagctgacgcgatttggctgctggttcaggatgcagtcgcaactttcgacccggatgcgatcgtggagattgtcggtggacagcgtcgtgggaaacctcagtctcacgacgttgatctgcttatcagttctccgggagctgaaaaagagcaagaagaccaactcctgcagaaagtgatgaatcattggaagaaacaagggttgttgctgtgtggtaaagtgtattggagtcagtgggaatgggggggtctgccgtccggtaaggctgatgagggtgacggggaggcatcgtgctttctgatcctcaaactttatgatcatctggtgcgtaaaagtaaacataatatgccgactggttcgaacatgggcgagtccaaaccgtggaaagcaattaaagtagatctgctgcgttgcccccgcggcagttttgcgtttgcgatgttgcagtggaccggaagccgcatgttccgtcgcgatctgcgcgattacgcccgcgaagagaagaacatgatgctggacaatcatagcctgtatgacatgactcgtggtatccaactccctgctaaatcggaagaggaaattttcgaacatctggggcttgaatacctggaaccgttctatcgtaacgca

SEQ ID NO: 5408 - protein, 529 aa, synthetic construct
  REGION 1..529: note = Variant of terminal deoxynucleotidyltransferase
MHHHHHHGGSGSHGIRTIDSDFGKKQQKKGDNHDSSATYEIKFHEFVLFILEEKMGATRRTFLTDLARKKGFRVENELTDEVTHIVAENLSRSEVLAWLKEHKMEKTKQFELLDISWLIESMKVGKPVDTKGKYQLAESVEVSANPDPTEGRVNELPPTMKTVSPYACQRRTTLNNRNQRFTDSLEILRENYVFKGNDDTALEFRRAISVLKSLPFEVRSLKDTEGLPWISDEVKGIMEEIIEVGESREVQAVLNDEWYQSFHAFTRVFGVGVGTADKWYQMGLRTLEDVRSSKTLKLTTWAKVGLTYYEDLARGVTRAEADAIWLLVQDAVATFDPDAIVEIVGGQRRGKPQSHDVDLLISSPGAEKEQEDQLLQKVMNHWKKQGLLLCGKVYWSQWEWGGLPSGKADEGDGEASCFLILKLYDHLVRKSKHNMPTGSNMGESKPWKAIKVDLLRCPRGSFAFAMLQWTGSRMFRRDLRDYAREEKNMMLDNHSLYDMTRGIQLPAKSEEEIFEHLGLEYLEPFYRNA

SEQ ID NO: 5409 - DNA, 1587 bp, synthetic construct
  misc_feature 1..1587: note = Variant of terminal deoxynucleotidyltransferase
  source 1..1587: mol_type = other DNA
atgcaccatcatcatcatcatggcggtagcggcagccacggcattcgtaccatcgattcggacttcgggaagaaacagcagaaaaaaggcgataaccacgatagttccgccacttatgaaatcaaatttcacgagtttgtgctgttcattctcgaagaaaaaatgggtgcgacgcgtcgtacttttctgacagatttagcccgcaagaaagggttccgcgtcgagaatgaactgaccgacgaagttacccacatcgtggcagaaaatctgtcacgctctgaagtattggcttggctgaaagaacacaagatggagaagaccaagcaattcgaactgctggatattagctggcttatcgaaagcatgaaagttggtaaaccggtggacaccaaggggaaataccagttggcggaatcggttgaggtgagtgcgaacccagatccgacagaaggtcgtgtaaacgagctgcctcctactatgaaaaccgtttctccgtatgcgtgtcaacgccgcaccaccctgaacaaccgtaatcaacgttttacggactcgctggagattcttcgcgagaattacgtgtttaaaggcaacgacgatactgcgctggaatttcgtcgtgctatctccgtgctgaaaagccttccgtttgaggtacgtagcctgaaagacacggaaggattgccctggatcagtgatgaagtcaaagggattatggaagaaatcatcgaagtcggggagtcgcgtgaagtgcaggccgtgctcaatgatgagtggtatcaaagcttccacgcatttacgcgtgtctttggagtgggggtaggcacagcagacaagtggtaccagatgggtctgcgcaccctggaggatgttcgttccagcaagaccctgaagttgaccacgtgggcgaaagtaggtctgacgtattatgaagatcttgctcgcggcgttacccgtgcggaagctgacgcgatttggctgctggttcaggatgcagtcgcaactttcgacccggatgcgatcgtggagattgtcggtggacagcgtcgtgggaaacctcagtctcacgacgttgatctgcttatcagttctccgggagcttctaaagagcaagaagaccaactcctgcagaaagtgatgaatctgtggaagaaacaagggttgttgctgtgtggtaaagtgtattggagtcagtgggaatgggggggtctgccgtccggtaaggctgatgagggtgacggggaggcatcgtgctttctgatcctcaaactttatgatcatctggtgcgtaaaagtaaacataatatgccgactggttcgaacatgggcgagtccaaaccgtggaaagcaattaaagtagatctgctgcgttgcccccgcggcagttttgcgtttgcgatgttgcagtggaccggaagccgcatgttccgtcgcgatctgcgcgattacgcccgcgaagagaagaacatgatgctggacaatcatagcctgtatgacatgactcgtggtatccaactccctgctaaatcggaagaggaaattttcgaacatctggggcttgaatacctggaaccgttctatcgtaacgca

SEQ ID NO: 5410 - protein, 529 aa, synthetic construct
  REGION 1..529: note = Variant of terminal deoxynucleotidyltransferase
MHHHHHHGGSGSHGIRTIDSDFGKKQQKKGDNHDSSATYEIKFHEFVLFILEEKMGATRRTFLTDLARKKGFRVENELTDEVTHIVAENLSRSEVLAWLKEHKMEKTKQFELLDISWLIESMKVGKPVDTKGKYQLAESVEVSANPDPTEGRVNELPPTMKTVSPYACQRRTTLNNRNQRFTDSLEILRENYVFKGNDDTALEFRRAISVLKSLPFEVRSLKDTEGLPWISDEVKGIMEEIIEVGESREVQAVLNDEWYQSFHAFTRVFGVGVGTADKWYQMGLRTLEDVRSSKTLKLTTWAKVGLTYYEDLARGVTRAEADAIWLLVQDAVATFDPDAIVEIVGGQRRGKPQSHDVDLLISSPGASKEQEDQLLQKVMNLWKKQGLLLCGKVYWSQWEWGGLPSGKADEGDGEASCFLILKLYDHLVRKSKHNMPTGSNMGESKPWKAIKVDLLRCPRGSFAFAMLQWTGSRMFRRDLRDYAREEKNMMLDNHSLYDMTRGIQLPAKSEEEIFEHLGLEYLEPFYRNA

SEQ ID NO: 5411 - DNA, 1587 bp, synthetic construct
  misc_feature 1..1587: note = Variant of terminal deoxynucleotidyltransferase
  source 1..1587: mol_type = other DNA
atgcaccatcatcatcatcatggcggtagcggcagccacggcattcgtaccatcgattcggacttcgggaagaaacagcagaaaaaaggcgataaccacgatagttccgccacttatgaaatcaaatttcacgagtttgtgctgttcattctcgaagaaaaaatgggtgcgacgcgtcgtacttttctgacagatttagcccgcaagaaagggttccgcgtcgagaatgaactgaccgacgaagttacccacatcgtggcagaaaatctgtcacgctctgaagtattggcttggctgaaagaacacaagatggagaagaccaagcaattcgaactgctggatattagctggcttatcgaaagcatgaaagttggtaaaccggtggacaccaaggggaaataccagttggcggaatcggttgaggtgagtgcgaacccagatccgacagaaggtcgtgtaaacgagctgcctcctactatgaaaaccgtttctccgtatgcgtgtcaacgccgcaccaccctgaacaaccgtaatcaacgttttacggactcgctggagattcttcgcgagaattacgtgtttaaaggccaggacgatactgcgctggaatttcgtcgtgctatctccgtgctgaaaagccttccgtttgaggtacgtagcctgaaagacacggaaggattgccctggatcagtgatgaagtcaaagggattatggaagaaatcatcgaagtcggggagtcgcgtgaagtgcaggccgtgctcaatgatgagtggtatcaaagcttccacgcatttacgcgtgtctttggagtgggggtaggcacagcagacaagtggtaccagatgggtctgcgcaccctggaggatgttcgttccagcaagaccctgaagttgaccacgtgggcgaaagtaggtctgacgtattatgaagatcttgctcgcggcgttacccgtgcggaagctgacgcgatttggctgctggttcaggatgcagtcgcaactttcgacccggatgcgatcgtggagattgtcggtggacagcgtcgtgggaaacctcagtctcacgacgttgatctgcttatcagttctccgggagctgaaaaagagcaagaagaccaactcctgcagaaagtgatgaatctgtggaagaaacaagggttgttgctgtgtggtaaagtgtattggagtcagtgggaatgggggggtctgccgtccggtaaggctgatgagggtgacggggaggcatcgtgctttctgatcctcaaactttatgatcatctggtgcgtaaaagtaaacataatatgccgactggttcgaacatgggcgagtccaaaccgtggaaagcaattaaagtagatctgctgcgttgcccccgcggcagttttgcgtttgcgatgttgcagtggaccggaagccgcatgttccgtcgcgatctgcgcgattacgcccgcgaagagaagaacatgatgctggacaatcatagcctgtatgacatgactcgtggtatccaactccctgctaaatcggaagaggaaattttcgaacatctggggcttgaatacctggaaccgttctatcgtaacgca

SEQ ID NO: 5412 - protein, 529 aa, synthetic construct
  REGION 1..529: note = Variant of terminal deoxynucleotidyltransferase
MHHHHHHGGSGSHGIRTIDSDFGKKQQKKGDNHDSSATYEIKFHEFVLFILEEKMGATRRTFLTDLARKKGFRVENELTDEVTHIVAENLSRSEVLAWLKEHKMEKTKQFELLDISWLIESMKVGKPVDTKGKYQLAESVEVSANPDPTEGRVNELPPTMKTVSPYACQRRTTLNNRNQRFTDSLEILRENYVFKGQDDTALEFRRAISVLKSLPFEVRSLKDTEGLPWISDEVKGIMEEIIEVGESREVQAVLNDEWYQSFHAFTRVFGVGVGTADKWYQMGLRTLEDVRSSKTLKLTTWAKVGLTYYEDLARGVTRAEADAIWLLVQDAVATFDPDAIVEIVGGQRRGKPQSHDVDLLISSPGAEKEQEDQLLQKVMNLWKKQGLLLCGKVYWSQWEWGGLPSGKADEGDGEASCFLILKLYDHLVRKSKHNMPTGSNMGESKPWKAIKVDLLRCPRGSFAFAMLQWTGSRMFRRDLRDYAREEKNMMLDNHSLYDMTRGIQLPAKSEEEIFEHLGLEYLEPFYRNA

SEQ ID NO: 5413 - DNA, 1587 bp, synthetic construct
  misc_feature 1..1587: note = Variant of terminal deoxynucleotidyltransferase
  source 1..1587: mol_type = other DNA
atgcaccatcatcatcatcatggcggtagcggcagccacggcattcgtaccatcgattcggacttcgggaagaaacagcagaaaaaaggcgataaccacgatagttccgccacttatgaaatcaaatttcacgagtttgtgctgttcattctcgaagaaaaaatgggtgcgacgcgtcgtacttttctgacagatttagcccgcaagaaagggttccgcgtcgagaatgaactgaccgacgaagttacccacatcgtggcagaaaatctgtcacgctctgaagtattggcttggctgaaagaacacaagatggagaagaccaagcaattcgaactgctggatattagctggcttatcgaaagcatgaaagttggtaaaccggtggacaccaaggggaaataccagttggcggaatcggttgaggtgagtgcgaacccagatccgacagaaggtcgtgtaaacgagctgcctcctactatgaaaaccgtttctccgtatgcgtgtcaacgccgcaccaccctgaacaaccgtaatcaacgttttacggactcgctggagattcttcgcgagaattacgtgtttaaaggcaacgacgatactgcgctggaatttcgtcgtgctatctccgtgctgaaaagccttccgtttgaggtacgtagcctgaaagacacggaaggattgccctggatcagtgatgaagtcaaagggattatggaagaaatcatcgaagtcggggagtcgcgtgaagtgcaggccgtgctcaatgatgagtggtatcaaagcttccacgcatttacgcgtgtctttggagtgggggtaggcacagcagacaagtggtaccagatgggtctgcgcaccctggaggatgttcgttccagcaagaccctgaagttgaccacgtgggcgaaagtaggtctgacgtattatgaagatcttgctcgcggcgttacccgtgcggaagctgacgcgatttggctgctggttcaggatgcagtcgcaactttcgacccggatgcgatcgtggagattgtcggtggacagcgtcgtgggaaacctcagtctcacgacgttgatctgcttatcagttctccgagggctgaaaaagagcaagaagaccaactcctgcagaaagtgatgaatctgtggaagaaacaagggttgttgctgtgtggtaaagtgtattggagtcagtgggaatgggggggtctgccgtccggtaaggctgatgagggtgacggggaggcatcgtgctttctgatcctcaaactttatgatcatctggtgcgtaaaagtaaacataatatgccgactggttcgaacatgggcgagtccaaaccgtggaaagcaattaaagtagatctgctgcgttgcccccgcggcagttttgcgtttgcgatgttgcagtggaccggaagccgcatgttccgtcgcgatctgcgcgattacgcccgcgaagagaagaacatgatgctggacaatcatagcctgtatgacatgactcgtggtatccaactccctgctaaatcggaagaggaaattttcgaacatctggggcttgaatacctggaaccgttctatcgtaacgca

SEQ ID NO: 5414 - protein, 529 aa, synthetic construct
  REGION 1..529: note = Variant of terminal deoxynucleotidyltransferase
MHHHHHHGGSGSHGIRTIDSDFGKKQQKKGDNHDSSATYEIKFHEFVLFILEEKMGATRRTFLTDLARKKGFRVENELTDEVTHIVAENLSRSEVLAWLKEHKMEKTKQFELLDISWLIESMKVGKPVDTKGKYQLAESVEVSANPDPTEGRVNELPPTMKTVSPYACQRRTTLNNRNQRFTDSLEILRENYVFKGNDDTALEFRRAISVLKSLPFEVRSLKDTEGLPWISDEVKGIMEEIIEVGESREVQAVLNDEWYQSFHAFTRVFGVGVGTADKWYQMGLRTLEDVRSSKTLKLTTWAKVGLTYYEDLARGVTRAEADAIWLLVQDAVATFDPDAIVEIVGGQRRGKPQSHDVDLLISSPRAEKEQEDQLLQKVMNLWKKQGLLLCGKVYWSQWEWGGLPSGKADEGDGEASCFLILKLYDHLVRKSKHNMPTGSNMGESKPWKAIKVDLLRCPRGSFAFAMLQWTGSRMFRRDLRDYAREEKNMMLDNHSLYDMTRGIQLPAKSEEEIFEHLGLEYLEPFYRNA

SEQ ID NO: 5415 - DNA, 1587 bp, synthetic construct
  misc_feature 1..1587: note = Variant of terminal deoxynucleotidyltransferase
  source 1..1587: mol_type = other DNA
atgcaccatcatcatcatcatggcggtagcggcagccacggcattcgtaccatcgattcggacttcgggaagaaacagcagaaaaaaggcgataaccacgatagttccgccacttatgaaatcaaatttcacgagtttgtgctgttcattctcgaagaaaaaatgggtgcgacgcgtcgtacttttctgacagatttagcccgcaagaaagggttccgcgtcgagaatgaactgaccgacgaagttacccacatcgtggcagaaaatctgtcacgctctgaagtattggcttggctgaaagaacacaagatggagaagaccaagcaattcgaactgctggatattagctggcttatcgaaagcatgaaagttggtaaaccggtggacaccaaggggaaataccagttggcggaatcggttgaggtgagtgcgaacccagatccgacagaaggtcgtgtaaacgagctgcctcctactatgaaaaccgtttctccgtatgcgtgtcaacgccgcaccaccctgaacaaccgtaatcaacgttttacggactcgctggagattcttcgcgagaattacgtgtttaaaggcaacgacgatactgcgctggaatttcgtcgtgctatctccgtgctgaaaagccttccgtttgaggtacgtagcctgaaagacacggaaggattgccctggatcagtgatttggtcaaagggattatggaagaaatcatcgaagtcggggagtcgcgtgaagtgcaggccgtgctcaatgatgagtggtatcaaagcttccacgcatttacgcgtgtctttggagtgggggtaggcacagcagacaagtggtaccagatgggtctgcgcaccctggaggatgttcgttccagcaagaccctgaagttgaccacgtgggcgaaagtaggtctgacgtattatgaagatcttgctcgcggcgttacccgtgcggaagctgacgcgatttggctgctggttcaggatgcagtcgcaactttcgacccggatgcgatcgtggagattgtcggtggacagcgtcgtgggaaacctcagtctcacgacgttgatctgcttatcagttctccgggagctgaaaaagagcaagaagaccaactcctgcagaaagtgatgaatctgtggaagaaacaagggttgttgctgtgtggtaaagtgtattggagtcagtgggaatgggggggtctgccgtccggtaaggctgatgagggtgacggggaggcatcgtgctttctgatcctcaaactttatgatcatctggtgcgtaaaagtaaacataatatgccgactggttcgaacatgggcgagtccaaaccgtggaaagcaattaaagtagatctgctgcgttgcccccgcggcagttttgcgtttgcgatgttgcagtggaccggaagccgcatgttccgtcgcgatctgcgcgattacgcccgcgaagagaagaacatgatgctggacaatcatagcctgtatgacatgactcgtggtatccaactccctgctaaatcggaagaggaaattttcgaacatctggggcttgaatacctggaaccgttctatcgtaacgca

SEQ ID NO: 5416 - protein, 529 aa, synthetic construct
  REGION 1..529: note = Variant of terminal deoxynucleotidyltransferase
MHHHHHHGGSGSHGIRTIDSDFGKKQQKKGDNHDSSATYEIKFHEFVLFILEEKMGATRRTFLTDLARKKGFRVENELTDEVTHIVAENLSRSEVLAWLKEHKMEKTKQFELLDISWLIESMKVGKPVDTKGKYQLAESVEVSANPDPTEGRVNELPPTMKTVSPYACQRRTTLNNRNQRFTDSLEILRENYVFKGNDDTALEFRRAISVLKSLPFEVRSLKDTEGLPWISDLVKGIMEEIIEVGESREVQAVLNDEWYQSFHAFTRVFGVGVGTADKWYQMGLRTLEDVRSSKTLKLTTWAKVGLTYYEDLARGVTRAEADAIWLLVQDAVATFDPDAIVEIVGGQRRGKPQSHDVDLLISSPGAEKEQEDQLLQKVMNLWKKQGLLLCGKVYWSQWEWGGLPSGKADEGDGEASCFLILKLYDHLVRKSKHNMPTGSNMGESKPWKAIKVDLLRCPRGSFAFAMLQWTGSRMFRRDLRDYAREEKNMMLDNHSLYDMTRGIQLPAKSEEEIFEHLGLEYLEPFYRNA

SEQ ID NO: 5417 - DNA, 1587 bp, synthetic construct
  misc_feature 1..1587: note = Variant of terminal deoxynucleotidyltransferase
  source 1..1587: mol_type = other DNA
atgcaccatcatcatcatcatggcggtagcggcagccacggcattcgtaccatcgattcggacttcgggaagaaacagcagaaaaaaggcgataaccacgatagttccgccacttatgaaatcaaatttcacgagtttgtgctgttcattctcgaagaaaaaatgggtgcgacgcgtcgtacttttctgacagatttagcccgcaagaaagggttccgcgtcgagaatgaactgaccgacgaagttacccacatcgtggcagaaaatctgtcacgctctgaagtattggcttggctgaaagaacacaagatggagaagaccaagcaattcgaactgctggatattagctggcttatcgaaagcatgaaagttggtaaaccggtggacaccaaggggaaataccagttggcggaatcggttgaggtgagtgcgaacccagatccgacagaaggtcgtgtaaacgagctgcctcctactatgaaaaccgtttctccgtatgcgtgtcaacgccgcaccaccctgaacaaccgtaatcaaaagtttacggactcgctggagattcttcgcgagaattacgtgtttaaaggcaacgacgatactgcgctggaatttcgtcgtgctatctccgtgctgaaaagccttccgtttgaggtacgtagcctgaaagacacggaaggattgccctggatcagtgatgaagtcaaagggattatggaagaaatcatcgaagtcggggagtcgcgtgaagtgcaggccgtgctcaatgatgagtggtatcaaagcttccacgcatttacgcgtgtctttggagtgggggtaggcacagcagacaagtggtaccagatgggtctgcgcaccctggaggatgttcgttccagcaagaccctgaagttgaccacgtgggcgaaagtaggtctgacgtattatgaagatcttgctcgcggcgttacccgtgcggaagctgacgcgatttggctgctggttcaggatgcagtcgcaactttcgacccggatgcgatcgtggagattgtcggtggacagcgtcgtgggaaacctcagtctcacgacgttgatctgcttatcagttctccgggagctgaaaaagagcaagaagaccaactcctgcagaaagtgatgaatctgtggaagaaacaagggttgttgctgtgtggtaaagtgtattggagtcagtgggaatgggggggtctgccgtccggtaaggctgatgagggtgacggggaggcatcgtgctttctgatcctcaaactttatgatcatctggtgcgtaaaagtaaacataatatgccgactggttcgaacatgggcgagtccaaaccgtggaaagcaattaaagtagatctgctgcgttgcccccgcggcagttttgcgtttgcgatgttgcagtggaccggaagccgcatgttccgtcgcgatctgcgcgattacgcccgcgaagagaagaacatgatgctggacaatcatagcctgtatgacatgactcgtggtatccaactccctgctaaatcggaagaggaaattttcgaacatctggggcttgaatacctggaaccgttctatcgtaacgca

SEQ ID NO: 5418 - protein, 529 aa, synthetic construct
  REGION 1..529: note = Variant of terminal deoxynucleotidyltransferase
MHHHHHHGGSGSHGIRTIDSDFGKKQQKKGDNHDSSATYEIKFHEFVLFILEEKMGATRRTFLTDLARKKGFRVENELTDEVTHIVAENLSRSEVLAWLKEHKMEKTKQFELLDISWLIESMKVGKPVDTKGKYQLAESVEVSANPDPTEGRVNELPPTMKTVSPYACQRRTTLNNRNQKFTDSLEILRENYVFKGNDDTALEFRRAISVLKSLPFEVRSLKDTEGLPWISDEVKGIMEEIIEVGESREVQAVLNDEWYQSFHAFTRVFGVGVGTADKWYQMGLRTLEDVRSSKTLKLTTWAKVGLTYYEDLARGVTRAEADAIWLLVQDAVATFDPDAIVEIVGGQRRGKPQSHDVDLLISSPGAEKEQEDQLLQKVMNLWKKQGLLLCGKVYWSQWEWGGLPSGKADEGDGEASCFLILKLYDHLVRKSKHNMPTGSNMGESKPWKAIKVDLLRCPRGSFAFAMLQWTGSRMFRRDLRDYAREEKNMMLDNHSLYDMTRGIQLPAKSEEEIFEHLGLEYLEPFYRNA

SEQ ID NO: 5419 - DNA, 1587 bp, synthetic construct
  misc_feature 1..1587: note = Variant of terminal deoxynucleotidyltransferase
  source 1..1587: mol_type = other DNA
atgcaccatcatcatcatcatggcggtagcggcagccacggcattcgtaccatcgattcggacttcgggaagaaacagcagaaaaaaggcgataaccacgatagttccgccacttatgaaatcaaatttcacgagtttgtgctgttcattctcgaagaaaaaatgggtgcgacgcgtcgtacttttctgacagatttagcccgcaagaaagggttccgcgtcgagaatgaactgaccgacgaagttacccacatcgtggcagaaaatctgtcacgctctgaagtattggcttggctgaaagaacacaagatggagaagaccaagcaattcgaactgctggatattagctggcttatcgaaagcatgaaagttggtaaaccggtggacaccaaggggaaataccagttggcggaatcggttgaggtgagtgcgaacccagatccgacagaaggtcgtgtaaacgagctgcctcctactatgaaaaccgtttctccgtatgcgtgtcaacgccgcaccaccctgaacaaccgtaatcaacgttttacggactcgctggagattcttcgcgagaattacgtgtttaaaggcaacgacgatactgcgctggaatttcgtcgtgctatctccgtgctgaaaagccttccgtttgaggtacgtagcctgaaagacacggaaggattgccctggatcagtgatgaagtcaaagggattatggaagaaatcatcgaagtcggggagtcgcgtgaagtgcaggccgtgctcaatgatgagtggtatcaaagcttccacgcatttacgcgtgtctttggagtgggggtaggcacagcagacaagtggtaccagatgggtctgcgcaccctggaggatgttcgttccagcaagaccctgaagttgaccacgtgggcgaaagtaggtctgacgtattatgaagatcttgctcgcggcgttacccgtgcggaagctgacgcgatttggctgctggttcaggatgcagtcgcaactttcgacccggatgcgatcgtggagattgtcggtggacagcgtcgtgggaaacctcagtctcacgacgttgatctgcttatcagttctccgggagctgaaaaagagcaagaagaccaactcctgcagaaagtgatgaatctgtggaagaaacaagggttgttgctgtgtggtaaagtgtattggagtcagtgggaatgggggggtctgccgtccggtaaggctgatgagggtgacggggaggcatcgtgctttctgatcctcaaactttatgatcatctggtgcgtaaaagtaaacataatatgccgactggttcgaacgagggcgagtccaaaccgtggaaagcaattaaagtagatctgctgcgttgcccccgcggcagttttgcgtttgcgatgttgcagtggaccggaagccgcatgttccgtcgcgatctgcgcgattacgcccgcgaagagaagaacatgatgctggacaatcatagcctgtatgacatgactcgtggtatccaactccctgctaaatcggaagaggaaattttcgaacatctggggcttgaatacctggaaccgttctatcgtaacgca

SEQ ID NO: 5420 - protein, 529 aa, synthetic construct
  REGION 1..529: note = Variant of terminal deoxynucleotidyltransferase
MHHHHHHGGSGSHGIRTIDSDFGKKQQKKGDNHDSSATYEIKFHEFVLFILEEKMGATRRTFLTDLARKKGFRVENELTDEVTHIVAENLSRSEVLAWLKEHKMEKTKQFELLDISWLIESMKVGKPVDTKGKYQLAESVEVSANPDPTEGRVNELPPTMKTVSPYACQRRTTLNNRNQRFTDSLEILRENYVFKGNDDTALEFRRAISVLKSLPFEVRSLKDTEGLPWISDEVKGIMEEIIEVGESREVQAVLNDEWYQSFHAFTRVFGVGVGTADKWYQMGLRTLEDVRSSKTLKLTTWAKVGLTYYEDLARGVTRAEADAIWLLVQDAVATFDPDAIVEIVGGQRRGKPQSHDVDLLISSPGAEKEQEDQLLQKVMNLWKKQGLLLCGKVYWSQWEWGGLPSGKADEGDGEASCFLILKLYDHLVRKSKHNMPTGSNEGESKPWKAIKVDLLRCPRGSFAFAMLQWTGSRMFRRDLRDYAREEKNMMLDNHSLYDMTRGIQLPAKSEEEIFEHLGLEYLEPFYRNA

SEQ ID NO: 5421 - DNA, 1587 bp, synthetic construct
  misc_feature 1..1587: note = Variant of terminal deoxynucleotidyltransferase
  source 1..1587: mol_type = other DNA
atgcaccatcatcatcatcatggcggtagcggcagccacggcattcgtaccatcgattcggacttcgggaagaaacagcagaaaaaaggcgataaccacgatagttccgccacttatgaaatcaaatttcacgagtttgtgctgttcattctcgaagaaaaaatgggtgcgacgcgtcgtacttttctgacagatttagcccgcaagaaagggttccgcgtcgagaatgaactgaccgacgaagttacccacatcgtggcagaaaatctgtcacgctctgaagtattggcttggctgaaagaacacaagatggagaagaccaagcaattcgaactgctggatattagctggcttatcgaaagcatgaaagttggtaaaccggtggacaccaaggggaaataccagttggcggaatcggttgaggtgagtgcgaacccagatccgacagaaggtcgtgtaaacgagctgcctcctactatgaaaaccgtttctccgtatgcgtgtcaacgccgcaccaccctgaacaaccgtaatcaacgttttacggactcgctggagattcttcgcgagaattacgtgtttaaaggcaacgacgatactgcgctggaatttcgtcgtgctatctccgtgctgaaaagccttccgtttgaggtacgtagcctgaaagacacggaaggattgccctggatcagtgatgaagtcaaagggattatggaagaaatcatcgaagtcggggagtcgcgtgaagtgcaggccgtgctcaatgatgagtggtatcaaagcttccacgcatttacgcgtgtctttggagtgggggtaggcacagcagacaagtggtaccagatgggtctgcgcaccctggaggatgttcgttccagcaagaccctgaagttgaccacgtgggcgaaagtaggtctgacgtattatgaagatcttgctcgcggcgttacccgtgcggaagctgacgcgatttggctgctggttcaggatgcagtcgcaactttctgtccggatgcgatcgtggagattgtcggtggacagcgtcgtgggaaacctcagtctcacgacgttgatctgcttatcagttctccgggagctgaaaaagagcaagaagaccaactcctgcagaaagtgatgaatctgtggaagaaacaagggttgttgctgtgtggtaaagtgtattggagtcagtgggaatgggggggtctgccgtccggtaaggctgatgagggtgacggggaggcatcgtgctttctgatcctcaaactttatgatcatctggtgcgtaaaagtaaacataatatgccgactggttcgaacatgggcgagtccaaaccgtggaaagcaattaaagtagatctgctgcgttgcccccgcggcagttttgcgtttgcgatgttgcagtggaccggaagccgcatgttccgtcgcgatctgcgcgattacgcccgcgaagagaagaacatgatgctggacaatcatagcctgtatgacatgactcgtggtatccaactccctgctaaatcggaagaggaaattttcgaacatctggggcttgaatacctggaaccgttctatcgtaacgca

SEQ ID NO: 5422 - protein, 529 aa, synthetic construct
  REGION 1..529: note = Variant of terminal deoxynucleotidyltransferase
MHHHHHHGGSGSHGIRTIDSDFGKKQQKKGDNHDSSATYEIKFHEFVLFILEEKMGATRRTFLTDLARKKGFRVENELTDEVTHIVAENLSRSEVLAWLKEHKMEKTKQFELLDISWLIESMKVGKPVDTKGKYQLAESVEVSANPDPTEGRVNELPPTMKTVSPYACQRRTTLNNRNQRFTDSLEILRENYVFKGNDDTALEFRRAISVLKSLPFEVRSLKDTEGLPWISDEVKGIMEEIIEVGESREVQAVLNDEWYQSFHAFTRVFGVGVGTADKWYQMGLRTLEDVRSSKTLKLTTWAKVGLTYYEDLARGVTRAEADAIWLLVQDAVATFCPDAIVEIVGGQRRGKPQSHDVDLLISSPGAEKEQEDQLLQKVMNLWKKQGLLLCGKVYWSQWEWGGLPSGKADEGDGEASCFLILKLYDHLVRKSKHNMPTGSNMGESKPWKAIKVDLLRCPRGSFAFAMLQWTGSRMFRRDLRDYAREEKNMMLDNHSLYDMTRGIQLPAKSEEEIFEHLGLEYLEPFYRNA

SEQ ID NO: 5423 - DNA, 1587 bp, synthetic construct
  misc_feature 1..1587: note = Variant of terminal deoxynucleotidyltransferase
  source 1..1587: mol_type = other DNA
atgcaccatcatcatcatcatggcggtagcggcagccacggcattcgtaccatcgattcggacttcgggaagaaacagcagaaaaaaggcgataaccacgatagttccgccacttatgaaatcaaatttcacgagtttgtgctgttcattctcgaagaaaaaatgggtgcgacgcgtcgtacttttctgacagatttagcccgcaagaaagggttccgcgtcgagaatgaactgaccgacgaagttacccacatcgtggcagaaaatctgtcacgctctgaagtattggcttggctgaaagaacacaagatggagaagaccaagcaattcgaactgctggatattagctggcttatcgaaagcatgaaagttggtaaaccggtggacaccaaggggaaataccagttggcggaatcggttgaggtgagtgcgaacccagatccgacagaaggtcgtgtaaacgagctgcctcctactatgaaaaccgtttctccgtatgcgtgtcaacgccgcaccaccctgaacaaccgtaatcaacgttttacggactcgctggagattcttcgcgagaattacgtgtttaaaggcaacgacgatactgcgctggaatttcgtcgtgctatctccgtgctgaaaagccttccgtttgaggtacgtagcctgaaagacacggaaggattgccctggatcagtgatgaagtcaaagggattatggaagaaatcatcgaagtcggggagtcgcgtgaagtgcaggccgtgctcaatgatgagtggtatcaaagcttccacgcatttacgcgtgtctttggagtgggggtaggcacagcagacaagtggtaccagatgggtctgcgcaccctggaggatgttcgttccagcaagaccctgaagttgaccacgtgggcgaaagtaggtctgacgtattatgaagatcttgctcgcggcgttacccgtgcggaagctgacgcgatttggctgctggttcaggatgcagtcgcaactttcgacccggatgcgatcgtggagattgtcggtggacagcgtcgtgggaaacctcagtctcacgacgttgatctgcttatcagttctccgggagctgaaaaagagcaagaagaccaactcctgcagaaagtgatgaatctgtggaagaaacaagggttgttgctgtgtggtaaagtgtattggagtcagtgggaatgggggggtctgccgtccggtaaggctgatgagggtgacggggaggcatcgtgctttctgatcctcaaactttatgatcatctggtgcgtaaaagtaaacataatatgccgactggttcgaacatgggcgagtccaaaccgtggaaagcaattaaagtagatctgctgcgttgcccgtggggcagttttgcgtttgcgatgttgcagtggaccggaagccgcatgttccgtcgcgatctgcgcgattacgcccgcgaagagaagaacatgatgctggacaatcatagcctgtatgacatgactcgtggtatccaactccctgctaaatcggaagaggaaattttcgaacatctggggcttgaatacctggaaccgttctatcgtaacgca

SEQ ID NO: 5424 - protein, 529 aa, synthetic construct
  REGION 1..529: note = Variant of terminal deoxynucleotidyltransferase
MHHHHHHGGSGSHGIRTIDSDFGKKQQKKGDNHDSSATYEIKFHEFVLFILEEKMGATRRTFLTDLARKKGFRVENELTDEVTHIVAENLSRSEVLAWLKEHKMEKTKQFELLDISWLIESMKVGKPVDTKGKYQLAESVEVSANPDPTEGRVNELPPTMKTVSPYACQRRTTLNNRNQRFTDSLEILRENYVFKGNDDTALEFRRAISVLKSLPFEVRSLKDTEGLPWISDEVKGIMEEIIEVGESREVQAVLNDEWYQSFHAFTRVFGVGVGTADKWYQMGLRTLEDVRSSKTLKLTTWAKVGLTYYEDLARGVTRAEADAIWLLVQDAVATFDPDAIVEIVGGQRRGKPQSHDVDLLISSPGAEKEQEDQLLQKVMNLWKKQGLLLCGKVYWSQWEWGGLPSGKADEGDGEASCFLILKLYDHLVRKSKHNMPTGSNMGESKPWKAIKVDLLRCPWGSFAFAMLQWTGSRMFRRDLRDYAREEKNMMLDNHSLYDMTRGIQLPAKSEEEIFEHLGLEYLEPFYRNA

SEQ ID NO: 5425 - DNA, 1587 bp, synthetic construct
  misc_feature 1..1587: note = Variant of terminal deoxynucleotidyltransferase
  source 1..1587: mol_type = other DNA
atgcaccatcatcatcatcatggcggtagcggcagccacggcattcgtaccatcgattcggacttcgggaagaaacagcagaaaaaaggcgataaccacgatagttccgccacttatgaaatcaaatttcacgagtttgtgctgttcattctcgaagaaaaaatgggtgcgacgcgtcgtacttttctgacagatttagcccgcaagaaagggttccgcgtcgagaatgaactgaccgacgaagttacccacatcgtggcagaaaatctgtcacgctctgaagtattggcttggctgaaagaacacaagatggagaagaccaagcaattcgaactgctggatattagctggcttatcgaaagcatgaaagttggtaaaccggtggacaccaaggggaaataccagttggcggaatcggttgaggtgagtgcgaacccagatccgacagaaggtcgtgtaaacgagctgcctcctactatgaaaaccgtttctccgtatgcgtgtcaacgccgcaccaccctgaacaaccgtaatcaacgttttacggactcgctggagattcttcgcgagaattacgtgtttaaaggcaacgacgatactgcgctggaatttcgtcgtgctatctccgtgctgaaaagccttccgtttgaggtacgtagcctgaaagacacggaaggattgccctggatcagtgatgaagtcaaagggattatggaagaaatcatcgaagtcggggagtcgcgtgaagtgcagagggtgctcaatgatgagtggtatcaaagcttccacgcatttacgcgtgtctttggagtgggggtaggcacagcagacaagtggtaccagatgggtctgcgcaccctggaggatgttcgttccagcaagaccctgaagttgaccacgtgggcgaaagtaggtctgacgtattatgaagatcttgctcgcggcgttacccgtgcggaagctgacgcgatttggctgctggttcaggatgcagtcgcaactttcgacccggatgcgatcgtggagattgtcggtggacagcgtcgtgggaaacctcagtctcacgacgttgatctgcttatcagttctccgggagctgaaaaagagcaagaagaccaactcctgcagaaagtgatgaatctgtggaagaaacaagggttgttgctgtgtggtaaagtgtattggagtcagtgggaatgggggggtctgccgtccggtaaggctgatgagggtgacggggaggcatcgtgctttctgatcctcaaactttatgatcatctggtgcgtaaaagtaaacataatatgccgactggttcgaacatgggcgagtccaaaccgtggaaagcaattaaagtagatctgctgcgttgcccccgcggcagttttgcgtttgcgatgttgcagtggaccggaagccgcatgttccgtcgcgatctgcgcgattacgcccgcgaagagaagaacatgatgctggacaatcatagcctgtatgacatgactcgtggtatccaactccctgctaaatcggaagaggaaattttcgaacatctggggcttgaatacctggaaccgttctatcgtaacgca

SEQ ID NO: 5426 - protein, 529 aa, synthetic construct
  REGION 1..529: note = Variant of terminal deoxynucleotidyltransferase
MHHHHHHGGSGSHGIRTIDSDFGKKQQKKGDNHDSSATYEIKFHEFVLFILEEKMGATRRTFLTDLARKKGFRVENELTDEVTHIVAENLSRSEVLAWLKEHKMEKTKQFELLDISWLIESMKVGKPVDTKGKYQLAESVEVSANPDPTEGRVNELPPTMKTVSPYACQRRTTLNNRNQRFTDSLEILRENYVFKGNDDTALEFRRAISVLKSLPFEVRSLKDTEGLPWISDEVKGIMEEIIEVGESREVQRVLNDEWYQSFHAFTRVFGVGVGTADKWYQMGLRTLEDVRSSKTLKLTTWAKVGLTYYEDLARGVTRAEADAIWLLVQDAVATFDPDAIVEIVGGQRRGKPQSHDVDLLISSPGAEKEQEDQLLQKVMNLWKKQGLLLCGKVYWSQWEWGGLPSGKADEGDGEASCFLILKLYDHLVRKSKHNMPTGSNMGESKPWKAIKVDLLRCPRGSFAFAMLQWTGSRMFRRDLRDYAREEKNMMLDNHSLYDMTRGIQLPAKSEEEIFEHLGLEYLEPFYRNA

SEQ ID NO: 5427 - DNA, 1587 bp, synthetic construct
  misc_feature 1..1587: note = Variant of terminal deoxynucleotidyltransferase
  source 1..1587: mol_type = other DNA
atgcaccatcatcatcatcatggcggtagcggcagccacggcattcgtaccatcgattcggacttcgggaagaaacagcagaaaaaaggcgataaccacgatagttccgccacttatgaaatcaaatttcacgagtttgtgctgttcattctcgaagaaaaaatgggtgcgacgcgtcgtacttttctgacagatttagcccgcaagaaagggttccgcgtcgagaatgaactgaccgacgaagttacccacatcgtggcagaaaatctgtcacgctctgaagtattggcttggctgaaagaacacaagatggagaagaccaagcaattcgaactgctggatattagctggcttatcgaaagcatgaaagttggtaaaccggtggacaccaaggggaaataccagttggcggaatcggttgaggtgagtgcgaacccagatccgacagaaggtcgtgtaaacgagctgcctcctactatgaaaaccgtttctccgtatgcgtgtcaacgccgcaccaccctgaacaaccgtaatcaacgttttacggactcgctggagattcttcgcgagaattacgtgtttaaaggcaacgacgatactgcgctggaatttcgtcgtgctatctccgtgctgaaaagccttccgtttgaggtacgtagcctgaaagacacggaaggattgccctggatcagtgatgaagtcaaagggattatggaagaaatcatcgaagtcggggagtcgcgtgaagtgcaggccgtgctcaatgatgagtggtatcaaagcttccacgcatttacgcgtgtctttggagtgggggtaggcacagcagacaagtggtaccagatgggtctgcgcaccctggaggatgttcgttccagcaagaccctgaagttgaccacgtgggcgaaagtaggtctgacgtattatgaagatcttgctcgcggcgttacccgtgcggaagctgacgcgatttggctgctggttcaggatgcagtcgcaactttcgacccggatgcgatcgtggagattgtcggtggacagcgtcgtgggaaacctcagtctcacgacgttgatctgcttatcagttctgcgggagctgaaaaagagcaagaagaccaactcctgcagaaagtgatgaatctgtggaagaaacaagggttgttgctgtgtggtaaagtgtattggagtcagtgggaatgggggggtctgccgtccggtaaggctgatgagggtgacggggaggcatcgtgctttctgatcctcaaactttatgatcatctggtgcgtaaaagtaaacataatatgccgactggttcgaacatgggcgagtccaaaccgtggaaagcaattaaagtagatctgctgcgttgcccccgcggcagttttgcgtttgcgatgttgcagtggaccggaagccgcatgttccgtcgcgatctgcgcgattacgcccgcgaagagaagaacatgatgctggacaatcatagcctgtatgacatgactcgtggtatccaactccctgctaaatcggaagaggaaattttcgaacatctggggcttgaatacctggaaccgttctatcgtaacgca

SEQ ID NO: 5428 - protein, 529 aa, synthetic construct
  REGION 1..529: note = Variant of terminal deoxynucleotidyltransferase
MHHHHHHGGSGSHGIRTIDSDFGKKQQKKGDNHDSSATYEIKFHEFVLFILEEKMGATRRTFLTDLARKKGFRVENELTDEVTHIVAENLSRSEVLAWLKEHKMEKTKQFELLDISWLIESMKVGKPVDTKGKYQLAESVEVSANPDPTEGRVNELPPTMKTVSPYACQRRTTLNNRNQRFTDSLEILRENYVFKGNDDTALEFRRAISVLKSLPFEVRSLKDTEGLPWISDEVKGIMEEIIEVGESREVQAVLNDEWYQSFHAFTRVFGVGVGTADKWYQMGLRTLEDVRSSKTLKLTTWAKVGLTYYEDLARGVTRAEADAIWLLVQDAVATFDPDAIVEIVGGQRRGKPQSHDVDLLISSAGAEKEQEDQLLQKVMNLWKKQGLLLCGKVYWSQWEWGGLPSGKADEGDGEASCFLILKLYDHLVRKSKHNMPTGSNMGESKPWKAIKVDLLRCPRGSFAFAMLQWTGSRMFRRDLRDYAREEKNMMLDNHSLYDMTRGIQLPAKSEEEIFEHLGLEYLEPFYRNA

SEQ ID NO: 5429 - DNA, 1587 bp, synthetic construct
  misc_feature 1..1587: note = Variant of terminal deoxynucleotidyltransferase
  source 1..1587: mol_type = other DNA
atgcaccatcatcatcatcatggcggtagcggcagccacggcattcgtaccatcgattcggacttcgggaagaaacagcagaaaaaaggcgataaccacgatagttccgccacttatgaaatcaaatttcacgagtttgtgctgttcattctcgaagaaaaaatgggtgcgacgcgtcgtacttttctgacagatttagcccgcaagaaagggttccgcgtcgagaatgaactgaccgacgaagttacccacatcgtggcagaaaatctgtcacgctctgaagtattggcttggctgaaagaacacaagatggagaagaccaagcaattcgaactgctggatattagctggcttatcgaaagcatgaaagttggtaaaccggtggacaccaaggggaaataccagttggcggaatcggttgaggtgagtgcgaacccagatccgacagaaggtcgtgtaaacgagctgcctcctactatgaaaaccgtttctccgtatgcgtgtcaacgccgcaccaccctgaacaaccgtaatcaacgttttacggactcgctggagattcttcgcgagaattacgtgtttaaaggcaacgacgatactgcgctggaatttcgtcgtgctatctccgtgctgaaaagccttccgtttgaggtacgtagcctgaaagacacggaaggattgccctggatcagtgatgaagtcaaagggattatggaagaaatcatcgaagtcggggagtcgcgtgaagtgcaggccgtgctcaatgatgagtggtatcaaagcttccacgcatttacgcgtgtctttggagtgggggtaggcacagcagacaagtggtaccagatgggtctgcgcaccctggaggatgttcgttccagcaagaccctgaagttgaccacgtgggcgaaagtaggtctgacgtattatgaagatcttgctcgcggcgttacccgtgcggaagctgacgcgatttggctgctggttcaggatgcagtcgcaactttcgacccggatgcgatcgtggagattgtcggtggacagcgtcgtgggaaacctcagtctcacgacgttgatctgcttatcagttctccgggagctgaaaaagagcaagaagaccaactcctgcagaaagtgatgaatctgtggaaggcgcaagggttgttgctgtgtggtaaagtgtattggagtcagtgggaatgggggggtctgccgtccggtaaggctgatgagggtgacggggaggcatcgtgctttctgatcctcaaactttatgatcatctggtgcgtaaaagtaaacataatatgccgactggttcgaacatgggcgagtccaaaccgtggaaagcaattaaagtagatctgctgcgttgcccccgcggcagttttgcgtttgcgatgttgcagtggaccggaagccgcatgttccgtcgcgatctgcgcgattacgcccgcgaagagaagaacatgatgctggacaatcatagcctgtatgacatgactcgtggtatccaactccctgctaaatcggaagaggaaattttcgaacatctggggcttgaatacctggaaccgttctatcgtaacgca

SEQ ID NO: 5430 - protein, 529 aa, synthetic construct
  REGION 1..529: note = Variant of terminal deoxynucleotidyltransferase
MHHHHHHGGSGSHGIRTIDSDFGKKQQKKGDNHDSSATYEIKFHEFVLFILEEKMGATRRTFLTDLARKKGFRVENELTDEVTHIVAENLSRSEVLAWLKEHKMEKTKQFELLDISWLIESMKVGKPVDTKGKYQLAESVEVSANPDPTEGRVNELPPTMKTVSPYACQRRTTLNNRNQRFTDSLEILRENYVFKGNDDTALEFRRAISVLKSLPFEVRSLKDTEGLPWISDEVKGIMEEIIEVGESREVQAVLNDEWYQSFHAFTRVFGVGVGTADKWYQMGLRTLEDVRSSKTLKLTTWAKVGLTYYEDLARGVTRAEADAIWLLVQDAVATFDPDAIVEIVGGQRRGKPQSHDVDLLISSPGAEKEQEDQLLQKVMNLWKAQGLLLCGKVYWSQWEWGGLPSGKADEGDGEASCFLILKLYDHLVRKSKHNMPTGSNMGESKPWKAIKVDLLRCPRGSFAFAMLQWTGSRMFRRDLRDYAREEKNMMLDNHSLYDMTRGIQLPAKSEEEIFEHLGLEYLEPFYRNA

SEQ ID NO: 5431 - DNA, 1587 bp, synthetic construct
  misc_feature 1..1587: note = Variant of terminal deoxynucleotidyltransferase
  source 1..1587: mol_type = other DNA
atgcaccatcatcatcatcatggcggtagcggcagccacggcattcgtaccatcgattcggacttcgggaagaaacagcagaaaaaaggcgataaccacgatagttccgccacttatgaaatcaaatttcacgagtttgtgctgttcattctcgaagaaaaaatgggtgcgacgcgtcgtacttttctgacagatttagcccgcaagaaagggttccgcgtcgagaatgaactgaccgacgaagttacccacatcgtggcagaaaatctgtcacgctctgaagtattggcttggctgaaagaacacaagatggagaagaccaagcaattcgaactgctggatattagctggcttatcgaaagcatgaaagttggtaaaccggtggacaccaaggggaaataccagttggcggaatcggttgaggtgagtgcgaacccagatccgacagaaggtcgtgtaaacgagctgcctcctactatgaaaaccgtttctccgtatgcgtgtcaacgccgcaccaccctgaacaaccgtaatcaacgttttacggactcgctggagattcttcgcgagaattacgtgtttaaaggcaacctggataaggcgctggggtttcgtcgtgctatctccgtgctgaaaagccttccgtttgaggtacgtagcctgaaagacacggaaggattgccctggatcagtgatgaagtcaaagggattatggaagaaatcatcgaagtcggggagtcgcgtgaagtgcaggccgtgctcaatgatgagtggtatcaaagcttccacgcatttacgcgtgtctttggagtgggggtaggcacagcagacaagtggtaccagatgggtctgcgcaccctggaggatgttcgttccagcaagaacctgaagttgaccacgtgggcgaaagtaggtctgacgtattatgaagatcttgctcgcggcgttacccgtgcggaagctgacgcgatttggctgctggttcaggatgcagtcgcaactttcgacccggatgcgatcgtggagattgtcggtggacagcgtcgtgggaaacctcagtctcacgacgttgatctgcttatcagttctccgggagctgaaaaagagcaagaagaccaactcctgcagaaagtgatgaatctgtggaagaaacaagggttgttgctgtgtggtaaagtgtattggagtcagtgggaatgggggggtctgccgtccggtaaggctgatgagggtgacggggaggcatcgtgctttctgatcctcaaactttatgatcatctggtgcgtaaaagtaaacataatatgccgactggttcgaacatgggcgagtccaaaccgtggaaagcaattaaagtagatctgctgcgttgcccccgcggcagttttgcgtttgcgatgttgcagtggaccggaagccgcatgttccgtcgcgatctgcgcgattacgcccgcgaagagaagaacatgatgctggacaatcatagcctgtatgacatgactcgtggtatccaactccctgctaaatcggaagaggaaattttcgaacatctggggcttgaatacctggaaccgttctatcgtaacgca

SEQ ID NO: 5432 - protein, 529 aa, synthetic construct
  REGION 1..529: note = Variant of terminal deoxynucleotidyltransferase
MHHHHHHGGSGSHGIRTIDSDFGKKQQKKGDNHDSSATYEIKFHEFVLFILEEKMGATRRTFLTDLARKKGFRVENELTDEVTHIVAENLSRSEVLAWLKEHKMEKTKQFELLDISWLIESMKVGKPVDTKGKYQLAESVEVSANPDPTEGRVNELPPTMKTVSPYACQRRTTLNNRNQRFTDSLEILRENYVFKGNLDKALGFRRAISVLKSLPFEVRSLKDTEGLPWISDEVKGIMEEIIEVGESREVQAVLNDEWYQSFHAFTRVFGVGVGTADKWYQMGLRTLEDVRSSKNLKLTTWAKVGLTYYEDLARGVTRAEADAIWLLVQDAVATFDPDAIVEIVGGQRRGKPQSHDVDLLISSPGAEKEQEDQLLQKVMNLWKKQGLLLCGKVYWSQWEWGGLPSGKADEGDGEASCFLILKLYDHLVRKSKHNMPTGSNMGESKPWKAIKVDLLRCPRGSFAFAMLQWTGSRMFRRDLRDYAREEKNMMLDNHSLYDMTRGIQLPAKSEEEIFEHLGLEYLEPFYRNA

SEQ ID NO: 5433 - DNA, 1587 bp, synthetic construct
  misc_feature 1..1587: note = Variant of terminal deoxynucleotidyltransferase
  source 1..1587: mol_type = other DNA
atgcaccatcatcatcatcatggcggtagcggcagccacggcattcgtaccatcgattcggacttcgggaagaaacagcagaaaaaaggcgataaccacgatagttccgccacttatgaaatcaaatttcacgagtttgtgctgttcattctcgaagaaaaaatgggtgcgacgcgtcgtacttttctgacagatttagcccgcaagaaagggttccgcgtcgagaatgaactgaccgacgaagttacccacatcgtggcagaaaatctgtcacgctctgaagtattggcttggctgaaagaacacaagatggagaagaccaagcaattcgaactgctggatattagctggcttatcgaaagcatgaaagttggtaaaccggtggacaccaaggggaaataccagttggcggaatcggttgaggtgagtgcgaacccagatccgacagaaggtcgtgtaaacgagctgcctcctactatgaaaaccgtttctccgtatgcgtgtcaacgccgcaccaccctgaacaactggaatcaacgttttacggactcgctggagattcttcgcgaaaattacgtgtttaaaggcaacgacgataaggcgctggagtttcgtcgtgctatctccgtgctgaaaagccttccgtttgaggtacgtagcctgaaagacacggaaggattgccctggatcagtgatgaagtcaaagggattatggaagaaatcatcgaagtcggggagtcgcgtgaagtgcaggccgtgctcaatgatgagtggtatcaaagcttccacgcatttacgcgtgtctttggagtgggggtaggcacagcagacaagtggtaccagatgggtctgcgcaccctggaggatgttcgttccagcaagaacctgaagttgaccacgtgggcgaaagtaggtctgacgtattatgaagatcttgctcgcggcgttacccgtgcggaagctgacgcgatttggatgctggttcaggatgcagtcgcaactttcgacccggatgcgatcgtggagattgtcggtggacagcgtcgtgggaaacctcagtctcacgacgttgatctgcttatcagttctccgggagctgaaaaagagcaagaagaccaactcctgcagaaagtgatgaatctgtggaagaaacaagggttgttgctgtgtggtaaagtgtattggagtcagtgggaatgggggggtctgccgtccggtaaggctgatgagggtgacggggaggcatcgtgctttctgatcctcaaactttatgatcatctggtgcgtaaaagtaaacataatatgccgactggttcgaacatgggcgagtccaaaccgtggaaagcaattaaagtagatctgctgcgttgcccccgcggcagttttgcgtttgcgatgttgcagtggaccggaagccgcatgttccgtcgcgatctgcgcgattacgcccgcgaagagaagaacatgatgctggacaatcatagcctgtatgacatgactcgtggtatccaactccctgctaaatcggaagaggaaattttcgaacatctggggcttgaatacctggaaccgttctatcgtaacgca

SEQ ID NO: 5434 - protein, 529 aa, synthetic construct
  REGION 1..529: note = Variant of terminal deoxynucleotidyltransferase
MHHHHHHGGSGSHGIRTIDSDFGKKQQKKGDNHDSSATYEIKFHEFVLFILEEKMGATRRTFLTDLARKKGFRVENELTDEVTHIVAENLSRSEVLAWLKEHKMEKTKQFELLDISWLIESMKVGKPVDTKGKYQLAESVEVSANPDPTEGRVNELPPTMKTVSPYACQRRTTLNNWNQRFTDSLEILRENYVFKGNDDKALEFRRAISVLKSLPFEVRSLKDTEGLPWISDEVKGIMEEIIEVGESREVQAVLNDEWYQSFHAFTRVFGVGVGTADKWYQMGLRTLEDVRSSKNLKLTTWAKVGLTYYEDLARGVTRAEADAIWMLVQDAVATFDPDAIVEIVGGQRRGKPQSHDVDLLISSPGAEKEQEDQLLQKVMNLWKKQGLLLCGKVYWSQWEWGGLPSGKADEGDGEASCFLILKLYDHLVRKSKHNMPTGSNMGESKPWKAIKVDLLRCPRGSFAFAMLQWTGSRMFRRDLRDYAREEKNMMLDNHSLYDMTRGIQLPAKSEEEIFEHLGLEYLEPFYRNA

SEQ ID NO: 5435 - DNA, 1587 bp, synthetic construct
  misc_feature 1..1587: note = Variant of terminal deoxynucleotidyltransferase
  source 1..1587: mol_type = other DNA
atgcaccatcatcatcatcatggcggtagcggcagccacggcattcgtaccatcgattcggacttcgggaagaaacagcagaaaaaaggcgataaccacgatagttccgccacttatgaaatcaaatttcacgagtttgtgctgttcattctcgaagaaaaaatgggtgcgacgcgtcgtacttttctgacagatttagcccgcaagaaagggttccgcgtcgagaatgaactgaccgacgaagttacccacatcgtggcagaaaatctgtcacgctctgaagtattggcttggctgaaagaacacaagatggagaagaccaagcaattcgaactgctggatattagctggcttatcgaaagcatgaaagttggtaaaccggtggacaccaaggggaaataccagttggcggaatcggttgaggtgagtgcgaacccagatccgacagaaggtcgtgtaaacgagctgcctcctactatgaaaaccgtttctccgtatgcgtgtcaacgccgcaccaccctgaacaaccgcaatcaacgttttacggactcgctggagattcttcgcgagaattacgtgtttaaaggcaacgacgataaggcgctggagtttcgtcgtgctatctccgtgctgaaaagccttccgtttgaggtacgtagcctgaaagacacggaaggattgccctggatcagtgatgaagtcaaagggattatggaagaaatcatcgaagtcggggagtcgcgtgaagtgcaggccgtgctcaatgatgagtggtatcaaagcttccacgcatttacgcgtgtctttggagtgggggtaggcacagcagacaagtggtaccagatgggtctgcgcaccctggaggatgttcgttccagcaagaccctgaagttgaccacgtgggcgaaagtaggtctgacgtattatgaagatcttgctcgcggcgttacccgtgcggaagctgacgcgatttggctgctggttcaggatgcagtcgcaactttcgacccggatgcgatcgtggagattgtcggtggacagcgtcgtgggaaacctcagtctcacgacgttgatctgcttatcagttctccgggagctgaaaaagagcaagaagaccaactcctgcagaaagtgatgcgcctgtggaagaaacaagggttgttgctgtgtggtaaagtgtattggagtcagtgggaatgggggggtctgccgtccggtaaggctgatgagggtgacggggaggcatcgtgctttctgatcctcaaactttatgatcatctggtgcgtaaaagtaaacataatatgccgactggttcgaacatgggcgagtccaaaccgtggaaagcaattaaagtagatctgctgcgttgcccccgcggcagttttgcgtttgcgatgttgcagtggaccggaagccgcatgttccgtcgcgatctgcgcgattacgcccgcgaagagaagaacatgatgctggacaatcatagcctgtatgacatgactcgtggtatccaactccctgctaaatcggaagaggaaattttcgaacatctggggcttgaatacctggaaccgttctatcgtaacgca

SEQ ID NO: 5436 - protein, 529 aa, synthetic construct
  REGION 1..529: note = Variant of terminal deoxynucleotidyltransferase
MHHHHHHGGSGSHGIRTIDSDFGKKQQKKGDNHDSSATYEIKFHEFVLFILEEKMGATRRTFLTDLARKKGFRVENELTDEVTHIVAENLSRSEVLAWLKEHKMEKTKQFELLDISWLIESMKVGKPVDTKGKYQLAESVEVSANPDPTEGRVNELPPTMKTVSPYACQRRTTLNNRNQRFTDSLEILRENYVFKGNDDKALEFRRAISVLKSLPFEVRSLKDTEGLPWISDEVKGIMEEIIEVGESREVQAVLNDEWYQSFHAFTRVFGVGVGTADKWYQMGLRTLEDVRSSKTLKLTTWAKVGLTYYEDLARGVTRAEADAIWLLVQDAVATFDPDAIVEIVGGQRRGKPQSHDVDLLISSPGAEKEQEDQLLQKVMRLWKKQGLLLCGKVYWSQWEWGGLPSGKADEGDGEASCFLILKLYDHLVRKSKHNMPTGSNMGESKPWKAIKVDLLRCPRGSFAFAMLQWTGSRMFRRDLRDYAREEKNMMLDNHSLYDMTRGIQLPAKSEEEIFEHLGLEYLEPFYRNA

SEQ ID NO: 5437 - DNA, 1587 bp, synthetic construct
  misc_feature 1..1587: note = Variant of terminal deoxynucleotidyltransferase
  source 1..1587: mol_type = other DNA
atgcaccatcatcatcatcatggcggtagcggcagccacggcattcgtaccatcgattcggacttcgggaagaaacagcagaaaaaaggcgataaccacgatagttccgccacttatgaaatcaaatttcacgagtttgtgctgttcattctcgaagaaaaaatgggtgcgacgcgtcgtacttttctgacagatttagcccgcaagaaagggttccgcgtcgagaatgaactgaccgacgaagttacccacatcgtggcagaaaatctgtcacgctctgaagtattggcttggctgaaagaacacaagatggagaagaccaagcaattcgaactgctggatattagctggcttatcgaaagcatgaaagttggtaaaccggtggacaccaaggggaaataccagttggcggaatcggttgaggtgagtgcgaacccagatccgacagaaggtcgtgtaaacgagctgcctcctactatgaaaaccgtttctccgtatgcgtgtcaacgccgcaccaccctgaacaaccgcaatcaacgttttacggaccatctggagattcttcgcgagaattacgtgtttaaaggcaacgacgataaggcgctggaatttcgtcgtgctatctccgtgctgaaaagccttccgtttgaggtacgtagcctgaaagacacggaaggattgccctggatcagtgatgaagtcaaagggattatggaagaaatcatcgaagtcggggagtcgcgtgaagtgcaggccgtgctcaatgatgagtggtatcaaagcttccacgcatttacgcgtgtctttggagtgggggtaggcacagcagacaagtggtaccagatgggtctgcgcaccctggaggatgttcgttccagcaagaacctgaagttgaccacgtgggcgaaagtaggtctgacgtattatgaagatcttgctcgcggcgttacccgtgcggaagctgacgcgatttggatgctggttcaggatgcagtcgcaactttcgacccggatgcgatcgtggagattgtcggtggacagcgtcgtgggaaacctcagtctcacgacgttgatctgcttatcagttctccgggagctgaaaaagagcaagaagaccaactcctgcagaaagtgatgaatctgtggaagaaacaagggttgttgctgtgtggtaaagtgtattggagtcagtgggaatgggggggtctgccgtccggtaaggctgatgagggtgacggggaggcatcgtgctttctgatcctcaaactttatgatcatctggtgcgtaaaagtaaacataatatgccgactggttcgaacatgggcgagtccaaaccgtggaaagcaattaaagtagatctgctgcgttgcccccgcggcagttttgcgtttgcgatgttgcagtggaccggaagccgcatgttccgtcgcgatctgcgcgattacgcccgcgaagagaagaacatgatgctggacaatcatagcctgtatgacatgactcgtggtatccaactccctgctaaatcggaagaggaaattttcgaacatctggggcttgaatacctggaaccgttctatcgtaacgca

SEQ ID NO: 5438 - protein, 529 aa, synthetic construct
  REGION 1..529: note = Variant of terminal deoxynucleotidyltransferase
MHHHHHHGGSGSHGIRTIDSDFGKKQQKKGDNHDSSATYEIKFHEFVLFILEEKMGATRRTFLTDLARKKGFRVENELTDEVTHIVAENLSRSEVLAWLKEHKMEKTKQFELLDISWLIESMKVGKPVDTKGKYQLAESVEVSANPDPTEGRVNELPPTMKTVSPYACQRRTTLNNRNQRFTDHLEILRENYVFKGNDDKALEFRRAISVLKSLPFEVRSLKDTEGLPWISDEVKGIMEEIIEVGESREVQAVLNDEWYQSFHAFTRVFGVGVGTADKWYQMGLRTLEDVRSSKNLKLTTWAKVGLTYYEDLARGVTRAEADAIWMLVQDAVATFDPDAIVEIVGGQRRGKPQSHDVDLLISSPGAEKEQEDQLLQKVMNLWKKQGLLLCGKVYWSQWEWGGLPSGKADEGDGEASCFLILKLYDHLVRKSKHNMPTGSNMGESKPWKAIKVDLLRCPRGSFAFAMLQWTGSRMFRRDLRDYAREEKNMMLDNHSLYDMTRGIQLPAKSEEEIFEHLGLEYLEPFYRNA

SEQ ID NO: 5439 - DNA, 1587 bp, synthetic construct
  misc_feature 1..1587: note = Variant of terminal deoxynucleotidyltransferase
  source 1..1587: mol_type = other DNA
atgcaccatcatcatcatcatggcggtagcggcagccacggcattcgtaccatcgattcggacttcgggaagaaacagcagaaaaaaggcgataaccacgatagttccgccacttatgaaatcaaatttcacgagtttgtgctgttcattctcgaagaaaaaatgggtgcgacgcgtcgtacttttctgacagatttagcccgcaagaaagggttccgcgtcgagaatgaactgaccgacgaagttacccacatcgtggcagaaaatctgtcacgctctgaagtattggcttggctgaaagaacacaagatggagaagaccaagcaattcgaactgctggatattagctggcttatcgaaagcatgaaagttggtaaaccggtggacaccaaggggaaataccagttggcggaatcggttgaggtgagtgcgaacccagatccgacagaaggtcgtgtaaacgagctgcctcctactatgaaaaccgtttctccgtatgcgtgtcaacgccgcaccaccctgaacaaccgcaatcaacgttttacggactcgctggagattcttcgcgagaattacgtgtttaaaggcaacgacgataaggcgctggagtttcgtcgtgctatctccgtgctgaaaagccttccgtttgaggtacgtagcctgaaagacacggaaggattgccctggatcagtgatgaagtcaaagggattatggaagaaatcatcgaagtcggggagtcgcgtgaagtgcaggccgtgctcaatgatgagtggtatcaaagcttccacgcatttacgcgtgtctttggagtgggggtaggcacagcagacaagtggtaccagatgggtctgcgcaccctggaggatgttcgttccagcaagaccctgaagttgaccacgtgggcgaaagtaggtctgacgtattatgaagatcttgctcgcggcgttacccgtgcggaagctgacgcgatttggatgctggttcaggatgcagtcgcaactttcgacccggatgcgatcgtggagattgtcggtggacagcgtcgtgggaaacctcagtctcacgacgttgatctgcttatcagttctccgggagctgaaaaagagcaagaagaccaactcctgcagaaagtgatgaatctgtggaagaaacaagggttgttgctgtgtggtaaagtgtattggagtcagtgggaatgggggggtctgccgtccggtaaggctgatgagggtgacggggaggcatcgtgctttctgatcctcaaactttatgatcatctggtgcgtaaaagtaaacataatatgccgactggttcgaacatgggcgagtccaaaccgtggaaagcaattaaagtagatctgctgcgttgcccccgcggcagttttgcgtttgcgatgttgcagtggaccggaagccgcatgttccgtcgcgatctgcgcgattacgcccgcgaagagaagaacatgatgctggacaatcatagcctgtatgacatgactcgtggtatccaactccctgctaaatcggaagaggaaattttcgaacatctggggcttgaatacctggaaccgttctatcgtaacgca

SEQ ID NO: 5440 - protein, 529 aa, synthetic construct
  REGION 1..529: note = Variant of terminal deoxynucleotidyltransferase
MHHHHHHGGSGSHGIRTIDSDFGKKQQKKGDNHDSSATYEIKFHEFVLFILEEKMGATRRTFLTDLARKKGFRVENELTDEVTHIVAENLSRSEVLAWLKEHKMEKTKQFELLDISWLIESMKVGKPVDTKGKYQLAESVEVSANPDPTEGRVNELPPTMKTVSPYACQRRTTLNNRNQRFTDSLEILRENYVFKGNDDKALEFRRAISVLKSLPFEVRSLKDTEGLPWISDEVKGIMEEIIEVGESREVQAVLNDEWYQSFHAFTRVFGVGVGTADKWYQMGLRTLEDVRSSKTLKLTTWAKVGLTYYEDLARGVTRAEADAIWMLVQDAVATFDPDAIVEIVGGQRRGKPQSHDVDLLISSPGAEKEQEDQLLQKVMNLWKKQGLLLCGKVYWSQWEWGGLPSGKADEGDGEASCFLILKLYDHLVRKSKHNMPTGSNMGESKPWKAIKVDLLRCPRGSFAFAMLQWTGSRMFRRDLRDYAREEKNMMLDNHSLYDMTRGIQLPAKSEEEIFEHLGLEYLEPFYRNA

SEQ ID NO: 5441 - DNA, 1587 bp, synthetic construct
  misc_feature 1..1587: note = Variant of terminal deoxynucleotidyltransferase
  source 1..1587: mol_type = other DNA
atgcaccatcatcatcatcatggcggtagcggcagccacggcattcgtaccatcgattcggacttcgggaagaaacagcagaaaaaaggcgataaccacgatagttccgccacttatgaaatcaaatttcacgagtttgtgctgttcattctcgaagaaaaaatgggtgcgacgcgtcgtacttttctgacagatttagcccgcaagaaagggttccgcgtcgagaatgaactgaccgacgaagttacccacatcgtggcagaaaatctgtcacgctctgaagtattggcttggctgaaagaacacaagatggagaagaccaagcaattcgaactgctggatattagctggcttatcgaaagcatgaaagttggtaaaccggtggacaccaaggggaaataccagttggcggaatcggttgaggtgagtgcgaacccagatccgacagaaggtcgtgtaaacgagctgcctcctactatgaaaaccgtttctccgtatgcgtgtcaacgccgcaccaccctgaacaaccgcaatcaacgttttacggactcgctggagattcttcgcgagaattacgtgtttaaaggcaacctggataaggcgctggggtttcgtcgtgctatctccgtgctgaaaagccttccgtttgaggtacgtagcctgaaagacacggaaggattgccctggatcagtgatgaagtcaaagggattatggaagaaatcatcgaagtcggggagtcgcgtgaagtgcaggccgtgctcaatgatgagtggtatcaaagcttccacgcatttacgcgtgtctttggagtgggggtaggcacagcagacaagtggtaccagatgggtctgcgcaccctggaggatgttcgttccagcaagaccctgaagttgaccacgtgggcgaaagtaggtctgacgtattatgaagatcttgctcgcggcgttacccgtgcggaagctgacgcgatttggctgctggttcaggatgcagtcgcaactttcgacccggatgcgatcgtggagattgtcggtggacagcgtcgtgggaaacctcagtctcacgacgttgatctgcttatcagttctccgggagctgaaaaagagcaagaagaccaactcctgcagaaagtgatgaatctgtggaagaaacaagggttgttgctgtgtggtaaagtgtattggagtcagtgggaatgggggggtctgccgtccggtaaggctgatgagggtgacggggaggcatcgtgctttctgatcctcaaactttatgatcatctggtgcgtaaaagtaaacataatatgccgactggttcgaacatgggcgagtccaaaccgtggaaagcaattaaagtagatctgctgcgttgcccccgcggcagttttgcgtttgcgatgttgcagtggaccggaagccgcatgttccgtcgcgatctgcgcgattacgcccgcgaagagaagaacatgatgctggacaatcatagcctgtatgacatgactcgtggtatccaactccctgctaaatcggaagaggaaattttcgaacatctggggcttgaatacctggaaccgttctatcgtaacgca

SEQ ID NO: 5442 - protein, 529 aa, synthetic construct
  REGION 1..529: note = Variant of terminal deoxynucleotidyltransferase
MHHHHHHGGSGSHGIRTIDSDFGKKQQKKGDNHDSSATYEIKFHEFVLFILEEKMGATRRTFLTDLARKKGFRVENELTDEVTHIVAENLSRSEVLAWLKEHKMEKTKQFELLDISWLIESMKVGKPVDTKGKYQLAESVEVSANPDPTEGRVNELPPTMKTVSPYACQRRTTLNNRNQRFTDSLEILRENYVFKGNLDKALGFRRAISVLKSLPFEVRSLKDTEGLPWISDEVKGIMEEIIEVGESREVQAVLNDEWYQSFHAFTRVFGVGVGTADKWYQMGLRTLEDVRSSKTLKLTTWAKVGLTYYEDLARGVTRAEADAIWLLVQDAVATFDPDAIVEIVGGQRRGKPQSHDVDLLISSPGAEKEQEDQLLQKVMNLWKKQGLLLCGKVYWSQWEWGGLPSGKADEGDGEASCFLILKLYDHLVRKSKHNMPTGSNMGESKPWKAIKVDLLRCPRGSFAFAMLQWTGSRMFRRDLRDYAREEKNMMLDNHSLYDMTRGIQLPAKSEEEIFEHLGLEYLEPFYRNA

SEQ ID NO: 5443 - DNA, 1587 bp, synthetic construct
  misc_feature 1..1587: note = Variant of terminal deoxynucleotidyltransferase
  source 1..1587: mol_type = other DNA
atgcaccatcatcatcatcatggcggtagcggcagccacggcattcgtaccatcgattcggacttcgggaagaaacagcagaaaaaaggcgataaccacgatagttccgccacttatgaaatcaaatttcacgagtttgtgctgttcattctcgaagaaaaaatgggtgcgacgcgtcgtacttttctgacagatttagcccgcaagaaagggttccgcgtcgagaatgaactgaccgacgaagttacccacatcgtggcagaaaatctgtcacgctctgaagtattggcttggctgaaagaacacaagatggagaagaccaagcaattcgaactgctggatattagctggcttatcgaaagcatgaaagttggtaaaccggtggacaccaaggggaaataccagttggcggaatcggttgaggtgagtgcgaacccagatccgacagaaggtcgtgtaaacgagctgcctcctactatgaaaaccgtttctccgtatgcgtgtcaacgccgcaccaccctgaacaactggaatcaacgttttacggactcgctggagattcttcgcgagaattacgtgtttaaaggcaacgacgataaggcgctggggtttcgtcgtgctatctccgtgctgaaaagccttccgtttgaggtacgtagcctgaaagacacggaaggattgccctggatcagtgatgaagtcaaagggattatggaagaaatcatcgaagtcggggagtcgcgtgaagtgcaggccgtgctcaatgatgagtggtatcaaagcttccacgcatttacgcgtgtctttggagtgggggtaggcacagcagacaagtggtaccagatgggtctgcgcaccctggaggatgttcgttccagcaagaacctgaagttgaccacgtgggcgaaagtaggtctgacgtattatgaagatcttgctcgcggcgttacccgtgcggaagctgacgcgatttggctgctggttcaggatgcagtcgcaactttcgacccggatgcgatcgtggagattgtcggtggacagcgtcgtgggaaacctcagtctcacgacgttgatctgcttatcagttctccgggagctgaaaaagagcaagaagaccaactcctgcagaaagtgatgaatctgtggaagaaacaagggttgttgctgtgtggtaaagtgtattggagtcagtgggaatgggggggtctgccgtccggtaaggctgatgagggtgacggggaggcatcgtgctttctgatcctcaaactttatgatcatctggtgcgtaaaagtaaacataatatgccgactggttcgaacatgggcgagtccaaaccgtggaaagcaattaaagtagatctgctgcgttgcccccgcggcagttttgcgtttgcgatgttgcagtggaccggaagccgcatgttccgtcgcgatctgcgcgattacgcccgcgaagagaagaacatgatgctggacaatcatagcctgtatgacatgactcgtggtatccaactccctgctaaatcggaagaggaaattttcgaacatctggggcttgaatacctggaaccgttctatcgtaacgca

SEQ ID NO: 5444 - protein, 529 aa, synthetic construct
  REGION 1..529: note = Variant of terminal deoxynucleotidyltransferase
MHHHHHHGGSGSHGIRTIDSDFGKKQQKKGDNHDSSATYEIKFHEFVLFILEEKMGATRRTFLTDLARKKGFRVENELTDEVTHIVAENLSRSEVLAWLKEHKMEKTKQFELLDISWLIESMKVGKPVDTKGKYQLAESVEVSANPDPTEGRVNELPPTMKTVSPYACQRRTTLNNWNQRFTDSLEILRENYVFKGNDDKALGFRRAISVLKSLPFEVRSLKDTEGLPWISDEVKGIMEEIIEVGESREVQAVLNDEWYQSFHAFTRVFGVGVGTADKWYQMGLRTLEDVRSSKNLKLTTWAKVGLTYYEDLARGVTRAEADAIWLLVQDAVATFDPDAIVEIVGGQRRGKPQSHDVDLLISSPGAEKEQEDQLLQKVMNLWKKQGLLLCGKVYWSQWEWGGLPSGKADEGDGEASCFLILKLYDHLVRKSKHNMPTGSNMGESKPWKAIKVDLLRCPRGSFAFAMLQWTGSRMFRRDLRDYAREEKNMMLDNHSLYDMTRGIQLPAKSEEEIFEHLGLEYLEPFYRNA

SEQ ID NO: 5445 - DNA, 1587 bp, synthetic construct
  misc_feature 1..1587: note = Variant of terminal deoxynucleotidyltransferase
  source 1..1587: mol_type = other DNA
atgcaccatcatcatcatcatggcggtagcggcagccacggcattcgtaccatcgattcggacttcgggaagaaacagcagaaaaaaggcgataaccacgatagttccgccacttatgaaatcaaatttcacgagtttgtgctgttcattctcgaagaaaaaatgggtgcgacgcgtcgtacttttctgacagatttagcccgcaagaaagggttccgcgtcgagaatgaactgaccgacgaagttacccacatcgtggcagaaaatctgtcacgctctgaagtattggcttggctgaaagaacacaagatggagaagaccaagcaattcgaactgctggatattagctggcttatcgaaagcatgaaagttggtaaaccggtggacaccaaggggaaataccagttggcggaatcggttgaggtgagtgcgaacccagatccgacagaaggtcgtgtaaacgagctgcctcctactatgaaaaccgtttctccgtatgcgtgtcaacgccgcaccaccctgaacaaccgcaatcaacgttttacggactcgctggagattcttcgcgaaaattacgtgtttaaaggcaacctggataaggcgctggagtttcgtcgtgctatctccgtgctgaaaagccttccgtttgaggtacgtagcctgaaagacacggaaggattgccctggatcagtgatgaagtcaaagggattatggaagaaatcatcgaagtcggggagtcgcgtgaagtgcaggccgtgctcaatgatgagtggtatcaaagcttccacgcatttacgcgtgtctttggagtgggggtaggcacagcagacaagtggtaccagatgggtctgcgcaccctggaggatgttcgttccagcaagaccctgaagttgaccacgtgggcgaaagtaggtctgacgtattatgaagatcttgctcgcggcgttacccgtgcggaagctgacgcgatttggctgctggttcaggatgcagtcgcaactttcgacccggatgcgatcgtggagattgtcggtggacagcgtcgtgggaaacctcagtctcacgacgttgatctgcttatcagttctccgggagctgaaaaagagcaagaagaccaactcctgcagaaagtgatgaatctgtggaagaaacaagggttgttgctgtgtggtaaagtgtattggagtcagtgggaatgggggggtctgccgtccggtaaggctgatgagggtgacggggaggcatcgtgctttctgatcctcaaactttatgatcatctggtgcgtaaaagtaaacataatatgccgactggttcgaacatgggcgagtccaaaccgtggaaagcaattaaagtagatctgctgcgttgcccccgcggcagttttgcgtttgcgatgttgcagtggaccggaagccgcatgttccgtcgcgatctgcgcgattacgcccgcgaagagaagaacatgatgctggacaatcatagcctgtatgacatgactcgtggtatccaactccctgctaaatcggaagaggaaattttcgaacatctggggcttgaatacctggaaccgttctatcgtaacgca

SEQ ID NO: 5446 - protein, 529 aa, synthetic construct
  REGION 1..529: note = Variant of terminal deoxynucleotidyltransferase
MHHHHHHGGSGSHGIRTIDSDFGKKQQKKGDNHDSSATYEIKFHEFVLFILEEKMGATRRTFLTDLARKKGFRVENELTDEVTHIVAENLSRSEVLAWLKEHKMEKTKQFELLDISWLIESMKVGKPVDTKGKYQLAESVEVSANPDPTEGRVNELPPTMKTVSPYACQRRTTLNNRNQRFTDSLEILRENYVFKGNLDKALEFRRAISVLKSLPFEVRSLKDTEGLPWISDEVKGIMEEIIEVGESREVQAVLNDEWYQSFHAFTRVFGVGVGTADKWYQMGLRTLEDVRSSKTLKLTTWAKVGLTYYEDLARGVTRAEADAIWLLVQDAVATFDPDAIVEIVGGQRRGKPQSHDVDLLISSPGAEKEQEDQLLQKVMNLWKKQGLLLCGKVYWSQWEWGGLPSGKADEGDGEASCFLILKLYDHLVRKSKHNMPTGSNMGESKPWKAIKVDLLRCPRGSFAFAMLQWTGSRMFRRDLRDYAREEKNMMLDNHSLYDMTRGIQLPAKSEEEIFEHLGLEYLEPFYRNA

SEQ ID NO: 5447 - DNA, 1587 bp, synthetic construct
  misc_feature 1..1587: note = Variant of terminal deoxynucleotidyltransferase
  source 1..1587: mol_type = other DNA
atgcaccatcatcatcatcatggcggtagcggcagccacggcattcgtaccatcgattcggacttcgggaagaaacagcagaaaaaaggcgataaccacgatagttccgccacttatgaaatcaaatttcacgagtttgtgctgttcattctcgaagaaaaaatgggtgcgacgcgtcgtacttttctgacagatttagcccgcaagaaagggttccgcgtcgagaatgaactgaccgacgaagttacccacatcgtggcagaaaatctgtcacgctctgaagtattggcttggctgaaagaacacaagatggagaagaccaagcaattcgaactgctggatattagctggcttatcgaaagcatgaaagttggtaaaccggtggacaccaaggggaaataccagttggcggaatcggttgaggtgagtgcgaacccagatccgacagaaggtcgtgtaaacgagctgcctcctactatgaaaaccgtttctccgtatgcgtgtcaacgccgcaccaccctgaacaaccgcaatcaacgttttacggactcgctggagattcttcgcatgaattacgtgtttaaaggcaacgacgataaggcgctggggtttcgtcgtgctatctccgtgctgaaaagccttccgtttgaggtacgtagcctgaaagacacggaaggattgccctggatcagtgatgaagtcaaagggattatggaagaaatcatcgaagtcggggagtcgcgtgaagtgcaggccgtgctcaatgatgagtggtatcaaagcttccacgcatttacgcgtgtctttggagtgggggtaggcacagcagacaagtggtaccagatgggtctgcgcaccctggaggatgttcgttccagcaagaacctgaagttgaccacgtgggcgaaagtaggtctgacgtattatgaagatcttgctcgcggcgttacccgtgcggaagctgacgcgatttggctgctggttcaggatgcagtcgcaactttcgacccggatgcgatcgtggagattgtcggtggacagcgtcgtgggaaacctcagtctcacgacgttgatctgcttatcagttctccgggagctgaaaaagagcaagaagaccaactcctgcagaaagtgatgcgcctgtggaagaaacaagggttgttgctgtgtggtaaagtgtattggagtcagtgggaatgggggggtctgccgtccggtaaggctgatgagggtgacggggaggcatcgtgctttctgatcctcaaactttatgatcatctggtgcgtaaaagtaaacataatatgccgactggttcgaacatgggcgagtccaaaccgtggaaagcaattaaagtagatctgctgcgttgcccccgcggcagttttgcgtttgcgatgttgcagtggaccggaagccgcatgttccgtcgcgatctgcgcgattacgcccgcgaagagaagaacatgatgctggacaatcatagcctgtatgacatgactcgtggtatccaactccctgctaaatcggaagaggaaattttcgaacatctggggcttgaatacctggaaccgttctatcgtaacgca

SEQ ID NO: 5448 - protein, 529 aa, synthetic construct
  REGION 1..529: note = Variant of terminal deoxynucleotidyltransferase
MHHHHHHGGSGSHGIRTIDSDFGKKQQKKGDNHDSSATYEIKFHEFVLFILEEKMGATRRTFLTDLARKKGFRVENELTDEVTHIVAENLSRSEVLAWLKEHKMEKTKQFELLDISWLIESMKVGKPVDTKGKYQLAESVEVSANPDPTEGRVNELPPTMKTVSPYACQRRTTLNNRNQRFTDSLEILRMNYVFKGNDDKALGFRRAISVLKSLPFEVRSLKDTEGLPWISDEVKGIMEEIIEVGESREVQAVLNDEWYQSFHAFTRVFGVGVGTADKWYQMGLRTLEDVRSSKNLKLTTWAKVGLTYYEDLARGVTRAEADAIWLLVQDAVATFDPDAIVEIVGGQRRGKPQSHDVDLLISSPGAEKEQEDQLLQKVMRLWKKQGLLLCGKVYWSQWEWGGLPSGKADEGDGEASCFLILKLYDHLVRKSKHNMPTGSNMGESKPWKAIKVDLLRCPRGSFAFAMLQWTGSRMFRRDLRDYAREEKNMMLDNHSLYDMTRGIQLPAKSEEEIFEHLGLEYLEPFYRNA

SEQ ID NO: 5449 - DNA, 1587 bp, synthetic construct
  misc_feature 1..1587: note = Variant of terminal deoxynucleotidyltransferase
  source 1..1587: mol_type = other DNA
atgcaccatcatcatcatcatggcggtagcggcagccacggcattcgtaccatcgattcggacttcgggaagaaacagcagaaaaaaggcgataaccacgatagttccgccacttatgaaatcaaatttcacgagtttgtgctgttcattctcgaagaaaaaatgggtgcgacgcgtcgtacttttctgacagatttagcccgcaagaaagggttccgcgtcgagaatgaactgaccgacgaagttacccacatcgtggcagaaaatctgtcacgctctgaagtattggcttggctgaaagaacacaagatggagaagaccaagcaattcgaactgctggatattagctggcttatcgaaagcatgaaagttggtaaaccggtggacaccaaggggaaataccagttggcggaatcggttgaggtgagtgcgaacccagatccgacagaaggtcgtgtaaacgagctgcctcctactatgaaaaccgtttctccgtatgcgtgtcaacgccgcaccaccctgaacaaccgcaatcaacgttttacggaccatctggagattcttcgcgagaattacgtgtttaaaggcaacctggataaggcgctggggtttcgtcgtgctatctccgtgctgaaaagccttccgtttgaggtacgtagcctgaaagacacggaaggattgccctggatcagtgatgaagtcaaagggattatggaagaaatcatcgaagtcggggagtcgcgtgaagtgcaggccgtgctcaatgatgagtggtatcaaagcttccacgcatttacgcgtgtctttggagtgggggtaggcacagcagacaagtggtaccagatgggtctgcgcaccctggaggatgttcgttccagcaagaacctgaagttgaccacgtgggcgaaagtaggtctgacgtattatgaagatcttgctcgcggcgttacccgtgcggaagctgacgcgatttggctgctggttcaggatgcagtcgcaactttcgacccggatgcgatcgtggagattgtcggtggacagcgtcgtgggaaacctcagtctcacgacgttgatctgcttatcagttctccgggagctgaaaaagagcaagaagaccaactcctgcagaaagtgatgaatctgtggaagaaacaagggttgttgctgtgtggtaaagtgtattggagtcagtgggaatgggggggtctgccgtccggtaaggctgatgagggtgacggggaggcatcgtgctttctgatcctcaaactttatgatcatctggtgcgtaaaagtaaacataatatgccgactggttcgaacatgggcgagtccaaaccgtggaaagcaattaaagtagatctgctgcgttgcccccgcggcagttttgcgtttgcgatgttgcagtggaccggaagccgcatgttccgtcgcgatctgcgcgattacgcccgcgaagagaagaacatgatgctggacaatcatagcctgtatgacatgactcgtggtatccaactccctgctaaatcggaagaggaaattttcgaacatctggggcttgaatacctggaaccgttctatcgtaacgca

SEQ ID NO: 5450 - protein, 529 aa, synthetic construct
  REGION 1..529: note = Variant of terminal deoxynucleotidyltransferase
MHHHHHHGGSGSHGIRTIDSDFGKKQQKKGDNHDSSATYEIKFHEFVLFILEEKMGATRRTFLTDLARKKGFRVENELTDEVTHIVAENLSRSEVLAWLKEHKMEKTKQFELLDISWLIESMKVGKPVDTKGKYQLAESVEVSANPDPTEGRVNELPPTMKTVSPYACQRRTTLNNRNQRFTDHLEILRENYVFKGNLDKALGFRRAISVLKSLPFEVRSLKDTEGLPWISDEVKGIMEEIIEVGESREVQAVLNDEWYQSFHAFTRVFGVGVGTADKWYQMGLRTLEDVRSSKNLKLTTWAKVGLTYYEDLARGVTRAEADAIWLLVQDAVATFDPDAIVEIVGGQRRGKPQSHDVDLLISSPGAEKEQEDQLLQKVMNLWKKQGLLLCGKVYWSQWEWGGLPSGKADEGDGEASCFLILKLYDHLVRKSKHNMPTGSNMGESKPWKAIKVDLLRCPRGSFAFAMLQWTGSRMFRRDLRDYAREEKNMMLDNHSLYDMTRGIQLPAKSEEEIFEHLGLEYLEPFYRNA

SEQ ID NO: 5451 - DNA, 1587 bp, synthetic construct
  misc_feature 1..1587: note = Variant of terminal deoxynucleotidyltransferase
  source 1..1587: mol_type = other DNA
atgcaccatcatcatcatcatggcggtagcggcagccacggcattcgtaccatcgattcggacttcgggaagaaacagcagaaaaaaggcgataaccacgatagttccgccacttatgaaatcaaatttcacgagtttgtgctgttcattctcgaagaaaaaatgggtgcgacgcgtcgtacttttctgacagatttagcccgcaagaaagggttccgcgtcgagaatgaactgaccgacgaagttacccacatcgtggcagaaaatctgtcacgctctgaagtattggcttggctgaaagaacacaagatggagaagaccaagcaattcgaactgctggatattagctggcttatcgaaagcatgaaagttggtaaaccggtggacaccaaggggaaataccagttggcggaatcggttgaggtgagtgcgaacccagatccgacagaaggtcgtgtaaacgagctgcctcctactatgaaaaccgtttctccgtatgcgtgtcaacgccgcaccaccctgaacaaccgcaatcaacgttttacggactcgctggagattcttcgcgagaattacgtgtttaaaggcaacgacgatactgcgctggaatttcgtcgtgctatctccgtgctgaaaagccttccgtttgaggtacgtagcctgaaagacacggaaggattgccctggatcagtgatgaagtcaaagggattatggaagaaatcatcgaagtcggggagtcgcgtgaagtgcaggccgtgctcaatgatgagtggtatcaaagcttccacgcatttacgcgtgtctttggagtgggggtaggcacagcagacaagtggtaccagatgggtctgcgcaccctggaggatgttcgttccagcaagaacctgaagttgaccacgtgggcgaaagtaggtctgacgtattatgaagatcttgctcgcggcgttacccgtgcggaagctgacgcgatttggctgctggttcaggatgcagtcgcaactttcgacccggatgcgatcgtggagattgtcggtggacagcgtcgtgggaaacctcagtctcacgacgttgatctgcttatcagttctccgggagctgaaaaagagcaagaagaccaactcctgcagaaagtgatgaatctgtggaagaaacaagggttgttgctgtgtggtaaagtgtattggagtcagtgggaatgggggggtctgccgtccggtaaggctgatgagggtgacggggaggcatcgtgctttctgatcctcaaactttatgatcatctggtgcgtaaaagtaaacataatatgccgactggttcgaacatgggcgagtccaaaccgtggaaagcaattaaagtagatctgctgcgttgcccccgcggcagttttgcgtttgcgatgttgcagtggaccggaagccgcatgttccgtcgcgatctgcgcgattacgcccgcgaagagaagaacatgatgctggacaatcatagcctgtatgacatgactcgtggtatccaactccctgctaaatcggaagaggaaattttcgaacatctggggcttgaatacctggaaccgttctatcgtaacgca

SEQ ID NO: 5452 - protein, 529 aa, synthetic construct
  REGION 1..529: note = Variant of terminal deoxynucleotidyltransferase
MHHHHHHGGSGSHGIRTIDSDFGKKQQKKGDNHDSSATYEIKFHEFVLFILEEKMGATRRTFLTDLARKKGFRVENELTDEVTHIVAENLSRSEVLAWLKEHKMEKTKQFELLDISWLIESMKVGKPVDTKGKYQLAESVEVSANPDPTEGRVNELPPTMKTVSPYACQRRTTLNNRNQRFTDSLEILRENYVFKGNDDTALEFRRAISVLKSLPFEVRSLKDTEGLPWISDEVKGIMEEIIEVGESREVQAVLNDEWYQSFHAFTRVFGVGVGTADKWYQMGLRTLEDVRSSKNLKLTTWAKVGLTYYEDLARGVTRAEADAIWLLVQDAVATFDPDAIVEIVGGQRRGKPQSHDVDLLISSPGAEKEQEDQLLQKVMNLWKKQGLLLCGKVYWSQWEWGGLPSGKADEGDGEASCFLILKLYDHLVRKSKHNMPTGSNMGESKPWKAIKVDLLRCPRGSFAFAMLQWTGSRMFRRDLRDYAREEKNMMLDNHSLYDMTRGIQLPAKSEEEIFEHLGLEYLEPFYRNA

SEQ ID NO: 5453 - DNA, 1587 bp, synthetic construct
  misc_feature 1..1587: note = Variant of terminal deoxynucleotidyltransferase
  source 1..1587: mol_type = other DNA
atgcaccatcatcatcatcatggcggtagcggcagccacggcattcgtaccatcgattcggacttcgggaagaaacagcagaaaaaaggcgataaccacgatagttccgccacttatgaaatcaaatttcacgagtttgtgctgttcattctcgaagaaaaaatgggtgcgacgcgtcgtacttttctgacagatttagcccgcaagaaagggttccgcgtcgagaatgaactgaccgacgaagttacccacatcgtggcagaaaatctgtcacgctctgaagtattggcttggctgaaagaacacaagatggagaagaccaagcaattcgaactgctggatattagctggcttatcgaaagcatgaaagttggtaaaccggtggacaccaaggggaaataccagttggcggaatcggttgaggtgagtgcgaacccagatccgacagaaggtcgtgtaaacgagctgcctcctactatgaaaaccgtttctccgtatgcgtgtcaacgccgcaccaccctgaacaaccgcaatcaacgttttacggactcgctggagattcttcgcgaaaattacgtgtttaaaggcaacgacgatacggcgctggggtttcgtcgtgctatctccgtgctgaaaagccttccgtttgaggtacgtagcctgaaagacacggaaggattgccctggatcagtgatgaagtcaaagggattatggaagaaatcatcgaagtcggggagtcgcgtgaagtgcaggccgtgctcaatgatgagtggtatcaaagcttccacgcatttacgcgtgtctttggagtgggggtaggcacagcagacaagtggtaccagatgggtctgcgcaccctggaggatgttcgttccagcaagaccctgaagttgaccacgtgggcgaaagtaggtctgacgtattatgaagatcttgctcgcggcgttacccgtgcggaagctgacgcgatttggctgctggttcaggatgcagtcgcaactttcgacccggatgcgatcgtggagattgtcggtggacagcgtcgtgggaaacctcagtctcacgacgttgatctgcttatcagttctccgggagctgaaaaagagcaagaagaccaactcctgcagaaagtgatgaatctgtggaagaaacaagggttgttgctgtgtggtaaagtgtattggagtcagtgggaatgggggggtctgccgtccggtaaggctgatgagggtgacggggaggcatcgtgctttctgatcctcaaactttatgatcatctggtgcgtaaaagtaaacataatatgccgactggttcgaacatgggcgagtccaaaccgtggaaagcaattaaagtagatctgctgcgttgcccccgcggcagttttgcgtttgcgatgttgcagtggaccggaagccgcatgttccgtcgcgatctgcgcgattacgcccgcgaagagaagaacatgatgctggacaatcatagcctgtatgacatgactcgtggtatccaactccctgctaaatcggaagaggaaattttcgaacatctggggcttgaatacctggaaccgttctatcgtaacgca

SEQ ID NO: 5454 - protein, 529 aa, synthetic construct
  REGION 1..529: note = Variant of terminal deoxynucleotidyltransferase
MHHHHHHGGSGSHGIRTIDSDFGKKQQKKGDNHDSSATYEIKFHEFVLFILEEKMGATRRTFLTDLARKKGFRVENELTDEVTHIVAENLSRSEVLAWLKEHKMEKTKQFELLDISWLIESMKVGKPVDTKGKYQLAESVEVSANPDPTEGRVNELPPTMKTVSPYACQRRTTLNNRNQRFTDSLEILRENYVFKGNDDTALGFRRAISVLKSLPFEVRSLKDTEGLPWISDEVKGIMEEIIEVGESREVQAVLNDEWYQSFHAFTRVFGVGVGTADKWYQMGLRTLEDVRSSKTLKLTTWAKVGLTYYEDLARGVTRAEADAIWLLVQDAVATFDPDAIVEIVGGQRRGKPQSHDVDLLISSPGAEKEQEDQLLQKVMNLWKKQGLLLCGKVYWSQWEWGGLPSGKADEGDGEASCFLILKLYDHLVRKSKHNMPTGSNMGESKPWKAIKVDLLRCPRGSFAFAMLQWTGSRMFRRDLRDYAREEKNMMLDNHSLYDMTRGIQLPAKSEEEIFEHLGLEYLEPFYRNA

SEQ ID NO: 5455 - DNA, 1587 bp, synthetic construct
  misc_feature 1..1587: note = Variant of terminal deoxynucleotidyltransferase
  source 1..1587: mol_type = other DNA
atgcaccatcatcatcatcatggcggtagcggcagccacggcattcgtaccatcgattcggacttcgggaagaaacagcagaaaaaaggcgataaccacgatagttccgccacttatgaaatcaaatttcacgagtttgtgctgttcattctcgaagaaaaaatgggtgcgacgcgtcgtacttttctgacagatttagcccgcaagaaagggttccgcgtcgagaatgaactgaccgacgaagttacccacatcgtggcagaaaatctgtcacgctctgaagtattggcttggctgaaagaacacaagatggagaagaccaagcaattcgaactgctggatattagctggcttatcgaaagcatgaaagttggtaaaccggtggacaccaaggggaaataccagttggcggaatcggttgaggtgagtgcgaacccagatccgacagaaggtcgtgtaaacgagctgcctcctactatgaaaaccgtttctccgtatgcgtgtcaacgccgcaccaccctgaacaaccgcaatcaacgttttacggactcgctggagattcttcgcatgaattacgtgtttaaaggcaacgacgataaggcgctggagtttcgtcgtgctatctccgtgctgaaaagccttccgtttgaggtacgtagcctgaaagacacggaaggattgccctggatcagtgatgaagtcaaagggattatggaagaaatcatcgaagtcggggagtcgcgtgaagtgcaggccgtgctcaatgatgagtggtatcaaagcttccacgcatttacgcgtgtctttggagtgggggtaggcacagcagacaagtggtaccagatgggtctgcgcaccctggaggatgttcgttccagcaagaacctgaagttgaccacgtgggcgaaagtaggtctgacgtattatgaagatcttgctcgcggcgttacccgtgcggaagctgacgcgatttggctgctggttcaggatgcagtcgcaactttcgacccggatgcgatcgtggagattgtcggtggacagcgtcgtgggaaacctcagtctcacgacgttgatctgcttatcagttctccgggagctgaaaaagagcaagaagaccaactcctgcagaaagtgatgaatctgtggaagaaacaagggttgttgctgtgtggtaaagtgtattggagtcagtgggaatgggggggtctgccgtccggtaaggctgatgagggtgacggggaggcatcgtgctttctgatcctcaaactttatgatcatctggtgcgtaaaagtaaacataatatgccgactggttcgaacatgggcgagtccaaaccgtggaaagcaattaaagtagatctgctgcgttgcccccgcggcagttttgcgtttgcgatgttgcagtggaccggaagccgcatgttccgtcgcgatctgcgcgattacgcccgcgaagagaagaacatgatgctggacaatcatagcctgtatgacatgactcgtggtatccaactccctgctaaatcggaagaggaaattttcgaacatctggggcttgaatacctggaaccgttctatcgtaacgca

SEQ ID NO: 5456 - protein, 529 aa, synthetic construct
  REGION 1..529: note = Variant of terminal deoxynucleotidyltransferase
MHHHHHHGGSGSHGIRTIDSDFGKKQQKKGDNHDSSATYEIKFHEFVLFILEEKMGATRRTFLTDLARKKGFRVENELTDEVTHIVAENLSRSEVLAWLKEHKMEKTKQFELLDISWLIESMKVGKPVDTKGKYQLAESVEVSANPDPTEGRVNELPPTMKTVSPYACQRRTTLNNRNQRFTDSLEILRMNYVFKGNDDKALEFRRAISVLKSLPFEVRSLKDTEGLPWISDEVKGIMEEIIEVGESREVQAVLNDEWYQSFHAFTRVFGVGVGTADKWYQMGLRTLEDVRSSKNLKLTTWAKVGLTYYEDLARGVTRAEADAIWLLVQDAVATFDPDAIVEIVGGQRRGKPQSHDVDLLISSPGAEKEQEDQLLQKVMNLWKKQGLLLCGKVYWSQWEWGGLPSGKADEGDGEASCFLILKLYDHLVRKSKHNMPTGSNMGESKPWKAIKVDLLRCPRGSFAFAMLQWTGSRMFRRDLRDYAREEKNMMLDNHSLYDMTRGIQLPAKSEEEIFEHLGLEYLEPFYRNA

SEQ ID NO: 5457 - DNA, 1587 bp, synthetic construct
  misc_feature 1..1587: note = Variant of terminal deoxynucleotidyltransferase
  source 1..1587: mol_type = other DNA
atgcaccatcatcatcatcatggcggtagcggcagccacggcattcgtaccatcgattcggacttcgggaagaaacagcagaaaaaaggcgataaccacgatagttccgccacttatgaaatcaaatttcacgagtttgtgctgttcattctcgaagaaaaaatgggtgcgacgcgtcgtacttttctgacagatttagcccgcaagaaagggttccgcgtcgagaatgaactgaccgacgaagttacccacatcgtggcagaaaatctgtcacgctctgaagtattggcttggctgaaagaacacaagatggagaagaccaagcaattcgaactgctggatattagctggcttatcgaaagcatgaaagttggtaaaccggtggacaccaaggggaaataccagttggcggaatcggttgaggtgagtgcgaacccagatccgacagaaggtcgtgtaaacgagctgcctcctactatgaaaaccgtttctccgtatgcgtgtcaacgccgcaccaccctgaacaactggaatcaacgttttacggactcgctggagattcttcgcgagaattacgtgtttaaaggcaacctggataaggcgctggagtttcgtcgtgctatctccgtgctgaaaagccttccgtttgaggtacgtagcctgaaagacacggaaggattgccctggatcagtgatgaagtcaaagggattatggaagaaatcatcgaagtcggggagtcgcgtgaagtgcaggccgtgctcaatgatgagtggtatcaaagcttccacgcatttacgcgtgtctttggagtgggggtaggcacagcagacaagtggtaccagatgggtctgcgcaccctggaggatgttcgttccagcaagaccctgaagttgaccacgtgggcgaaagtaggtctgacgtattatgaagatcttgctcgcggcgttacccgtgcggaagctgacgcgatttggctgctggttcaggatgcagtcgcaactttcgacccggatgcgatcgtggagattgtcggtggacagcgtcgtgggaaacctcagtctcacgacgttgatctgcttatcagttctccgggagctgaaaaagagcaagaagaccaactcctgcagaaagtgatgaatctgtggaagaaacaagggttgttgctgtgtggtaaagtgtattggagtcagtgggaatgggggggtctgccgtccggtaaggctgatgagggtgacggggaggcatcgtgctttctgatcctcaaactttatgatcatctggtgcgtaaaagtaaacataatatgccgactggttcgaacatgggcgagtccaaaccgtggaaagcaattaaagtagatctgctgcgttgcccccgcggcagttttgcgtttgcgatgttgcagtggaccggaagccgcatgttccgtcgcgatctgcgcgattacgcccgcgaagagaagaacatgatgctggacaatcatagcctgtatgacatgactcgtggtatccaactccctgctaaatcggaagaggaaattttcgaacatctggggcttgaatacctggaaccgttctatcgtaacgca

SEQ ID NO: 5458 - protein, 529 aa, synthetic construct
  REGION 1..529: note = Variant of terminal deoxynucleotidyltransferase
MHHHHHHGGSGSHGIRTIDSDFGKKQQKKGDNHDSSATYEIKFHEFVLFILEEKMGATRRTFLTDLARKKGFRVENELTDEVTHIVAENLSRSEVLAWLKEHKMEKTKQFELLDISWLIESMKVGKPVDTKGKYQLAESVEVSANPDPTEGRVNELPPTMKTVSPYACQRRTTLNNWNQRFTDSLEILRENYVFKGNLDKALEFRRAISVLKSLPFEVRSLKDTEGLPWISDEVKGIMEEIIEVGESREVQAVLNDEWYQSFHAFTRVFGVGVGTADKWYQMGLRTLEDVRSSKTLKLTTWAKVGLTYYEDLARGVTRAEADAIWLLVQDAVATFDPDAIVEIVGGQRRGKPQSHDVDLLISSPGAEKEQEDQLLQKVMNLWKKQGLLLCGKVYWSQWEWGGLPSGKADEGDGEASCFLILKLYDHLVRKSKHNMPTGSNMGESKPWKAIKVDLLRCPRGSFAFAMLQWTGSRMFRRDLRDYAREEKNMMLDNHSLYDMTRGIQLPAKSEEEIFEHLGLEYLEPFYRNA

SEQ ID NO: 5459 - DNA, 1587 bp, synthetic construct
  misc_feature 1..1587: note = Variant of terminal deoxynucleotidyltransferase
  source 1..1587: mol_type = other DNA
atgcaccatcatcatcatcatggcggtagcggcagccacggcattcgtaccatcgattcggacttcgggaagaaacagcagaaaaaaggcgataaccacgatagttccgccacttatgaaatcaaatttcacgagtttgtgctgttcattctcgaagaaaaaatgggtgcgacgcgtcgtacttttctgacagatttagcccgcaagaaagggttccgcgtcgagaatgaactgaccgacgaagttacccacatcgtggcagaaaatctgtcacgctctgaagtattggcttggctgaaagaacacaagatggagaagaccaagcaattcgaactgctggatattagctggcttatcgaaagcatgaaagttggtaaaccggtggacaccaaggggaaataccagttggcggaatcggttgaggtgagtgcgaacccagatccgacagaaggtcgtgtaaacgagctgcctcctactatgaaaaccgtttctccgtatgcgtgtcaacgccgcaccaccctgaacaaccgcaatcaacgttttacggactcgctggagattcttcgcgagaattacgtgtttaaaggcaacctggatacggcgctggagtttcgtcgtgctatctccgtgctgaaaagccttccgtttgaggtacgtagcctgaaagacacggaaggattgccctggatcagtgatgaagtcaaagggattatggaagaaatcatcgaagtcggggagtcgcgtgaagtgcaggccgtgctcaatgatgagtggtatcaaagcttccacgcatttacgcgtgtctttggagtgggggtaggcacagcagacaagtggtaccagatgggtctgcgcaccctggaggatgttcgttccagcaagaccctgaagttgaccacgtgggcgaaagtaggtctgacgtattatgaagatcttgctcgcggcgttacccgtgcggaagctgacgcgatttggctgctggttcaggatgcagtcgcaactttcgacccggatgcgatcgtggagattgtcggtggacagcgtcgtgggaaacctcagtctcacgacgttgatctgcttatcagttctccgggagctgaaaaagagcaagaagaccaactcctgcagaaagtgatgaatctgtggaagaaacaagggttgttgctgtgtggtaaagtgtattggagtcagtgggaatgggggggtctgccgtccggtaaggctgatgagggtgacggggaggcatcgtgctttctgatcctcaaactttatgatcatctggtgcgtaaaagtaaacataatatgccgactggttcgaacatgggcgagtccaaaccgtggaaagcaattaaagtagatctgctgcgttgcccccgcggcagttttgcgtttgcgatgttgcagtggaccggaagccgcatgttccgtcgcgatctgcgcgattacgcccgcgaagagaagaacatgatgctggacaatcatagcctgtatgacatgactcgtggtatccaactccctgctaaatcggaagaggaaattttcgaacatctggggcttgaatacctggaaccgttctatcgtaacgca

SEQ ID NO: 5460 - protein, 529 aa, synthetic construct
  REGION 1..529: note = Variant of terminal deoxynucleotidyltransferase
MHHHHHHGGSGSHGIRTIDSDFGKKQQKKGDNHDSSATYEIKFHEFVLFILEEKMGATRRTFLTDLARKKGFRVENELTDEVTHIVAENLSRSEVLAWLKEHKMEKTKQFELLDISWLIESMKVGKPVDTKGKYQLAESVEVSANPDPTEGRVNELPPTMKTVSPYACQRRTTLNNRNQRFTDSLEILRENYVFKGNLDTALEFRRAISVLKSLPFEVRSLKDTEGLPWISDEVKGIMEEIIEVGESREVQAVLNDEWYQSFHAFTRVFGVGVGTADKWYQMGLRTLEDVRSSKTLKLTTWAKVGLTYYEDLARGVTRAEADAIWLLVQDAVATFDPDAIVEIVGGQRRGKPQSHDVDLLISSPGAEKEQEDQLLQKVMNLWKKQGLLLCGKVYWSQWEWGGLPSGKADEGDGEASCFLILKLYDHLVRKSKHNMPTGSNMGESKPWKAIKVDLLRCPRGSFAFAMLQWTGSRMFRRDLRDYAREEKNMMLDNHSLYDMTRGIQLPAKSEEEIFEHLGLEYLEPFYRNA

SEQ ID NO: 5461 - DNA, 1587 bp, synthetic construct
  misc_feature 1..1587: note = Variant of terminal deoxynucleotidyltransferase
  source 1..1587: mol_type = other DNA
atgcaccatcatcatcatcatggcggtagcggcagccacggcattcgtaccatcgattcggacttcgggaagaaacagcagaaaaaaggcgataaccacgatagttccgccacttatgaaatcaaatttcacgagtttgtgctgttcattctcgaagaaaaaatgggtgcgacgcgtcgtacttttctgacagatttagcccgcaagaaagggttccgcgtcgagaatgaactgaccgacgaagttacccacatcgtggcagaaaatctgtcacgctctgaagtattggcttggctgaaagaacacaagatggagaagaccaagcaattcgaactgctggatattagctggcttatcgaaagcatgaaagttggtaaaccggtggacaccaaggggaaataccagttggcggaatcggttgaggtgagtgcgaacccagatccgacagaaggtcgtgtaaacgagctgcctcctactatgaaaaccgtttctccgtatgcgtgtcaacgccgcaccaccctgaacaactggaatcaacgttttacggactcgctggagattcttcgcgagaattacgtgtttaaaggcaacgacgataaggcgctggggtttcgtcgtgctatctccgtgctgaaaagccttccgtttgaggtacgtagcctgaaagacacggaaggattgccctggatcagtgatgaagtcaaagggattatggaagaaatcatcgaagtcggggagtcgcgtgaagtgcaggccgtgctcaatgatgagtggtatcaaagcttccacgcatttacgcgtgtctttggagtgggggtaggcacagcagacaagtggtaccagatgggtctgcgcaccctggaggatgttcgttccagcaagaccctgaagttgaccacgtgggcgaaagtaggtctgacgtattatgaagatcttgctcgcggcgttacccgtgcggaagctgacgcgatttggctgctggttcaggatgcagtcgcaactttcgacccggatgcgatcgtggagattgtcggtggacagcgtcgtgggaaacctcagtctcacgacgttgatctgcttatcagttctccgggagctgaaaaagagcaagaagaccaactcctgcagaaagtgatgaatctgtggaagaaacaagggttgttgctgtgtggtaaagtgtattggagtcagtgggaatgggggggtctgccgtccggtaaggctgatgagggtgacggggaggcatcgtgctttctgatcctcaaactttatgatcatctggtgcgtaaaagtaaacataatatgccgactggttcgaacatgggcgagtccaaaccgtggaaagcaattaaagtagatctgctgcgttgcccccgcggcagttttgcgtttgcgatgttgcagtggaccggaagccgcatgttccgtcgcgatctgcgcgattacgcccgcgaagagaagaacatgatgctggacaatcatagcctgtatgacatgactcgtggtatccaactccctgctaaatcggaagaggaaattttcgaacatctggggcttgaatacctggaaccgttctatcgtaacgca

SEQ ID NO: 5462 - protein, 529 aa, synthetic construct
  REGION 1..529: note = Variant of terminal deoxynucleotidyltransferase
MHHHHHHGGSGSHGIRTIDSDFGKKQQKKGDNHDSSATYEIKFHEFVLFILEEKMGATRRTFLTDLARKKGFRVENELTDEVTHIVAENLSRSEVLAWLKEHKMEKTKQFELLDISWLIESMKVGKPVDTKGKYQLAESVEVSANPDPTEGRVNELPPTMKTVSPYACQRRTTLNNWNQRFTDSLEILRENYVFKGNDDKALGFRRAISVLKSLPFEVRSLKDTEGLPWISDEVKGIMEEIIEVGESREVQAVLNDEWYQSFHAFTRVFGVGVGTADKWYQMGLRTLEDVRSSKTLKLTTWAKVGLTYYEDLARGVTRAEADAIWLLVQDAVATFDPDAIVEIVGGQRRGKPQSHDVDLLISSPGAEKEQEDQLLQKVMNLWKKQGLLLCGKVYWSQWEWGGLPSGKADEGDGEASCFLILKLYDHLVRKSKHNMPTGSNMGESKPWKAIKVDLLRCPRGSFAFAMLQWTGSRMFRRDLRDYAREEKNMMLDNHSLYDMTRGIQLPAKSEEEIFEHLGLEYLEPFYRNA

SEQ ID NO: 5463 - DNA, 1587 bp, synthetic construct
  misc_feature 1..1587: note = Variant of terminal deoxynucleotidyltransferase
  source 1..1587: mol_type = other DNA
atgcaccatcatcatcatcatggcggtagcggcagccacggcattcgtaccatcgattcggacttcgggaagaaacagcagaaaaaaggcgataaccacgatagttccgccacttatgaaatcaaatttcacgagtttgtgctgttcattctcgaagaaaaaatgggtgcgacgcgtcgtacttttctgacagatttagcccgcaagaaagggttccgcgtcgagaatgaactgaccgacgaagttacccacatcgtggcagaaaatctgtcacgctctgaagtattggcttggctgaaagaacacaagatggagaagaccaagcaattcgaactgctggatattagctggcttatcgaaagcatgaaagttggtaaaccggtggacaccaaggggaaataccagttggcggaatcggttgaggtgagtgcgaacccagatccgacagaaggtcgtgtaaacgagctgcctcctactatgaaaaccgtttctccgtatgcgtgtcaacgccgcaccaccctgaacaaccgtaatcaacgttttacggactcgctggagattcttcgcatgaattacgtgtttaaaggcaacctggataaggcgctggggtttcgtcgtgctatctccgtgctgaaaagccttccgtttgaggtacgtagcctgaaagacacggaaggattgccctggatcagtgatgaagtcaaagggattatggaagaaatcatcgaagtcggggagtcgcgtgaagtgcaggccgtgctcaatgatgagtggtatcaaagcttccacgcatttacgcgtgtctttggagtgggggtaggcacagcagacaagtggtaccagatgggtctgcgcaccctggaggatgttcgttccagcaagaccctgaagttgaccacgtgggcgaaagtaggtctgacgtattatgaagatcttgctcgcggcgttacccgtgcggaagctgacgcgatttggctgctggttcaggatgcagtcgcaactttcgacccggatgcgatcgtggagattgtcggtggacagcgtcgtgggaaacctcagtctcacgacgttgatctgcttatcagttctccgggagctgaaaaagagcaagaagaccaactcctgcagaaagtgatgaatctgtggaagaaacaagggttgttgctgtgtggtaaagtgtattggagtcagtgggaatgggggggtctgccgtccggtaaggctgatgagggtgacggggaggcatcgtgctttctgatcctcaaactttatgatcatctggtgcgtaaaagtaaacataatatgccgactggttcgaacatgggcgagtccaaaccgtggaaagcaattaaagtagatctgctgcgttgcccccgcggcagttttgcgtttgcgatgttgcagtggaccggaagccgcatgttccgtcgcgatctgcgcgattacgcccgcgaagagaagaacatgatgctggacaatcatagcctgtatgacatgactcgtggtatccaactccctgctaaatcggaagaggaaattttcgaacatctggggcttgaatacctggaaccgttctatcgtaacgca

SEQ ID NO: 5464 - protein, 529 aa, synthetic construct
  REGION 1..529: note = Variant of terminal deoxynucleotidyltransferase
MHHHHHHGGSGSHGIRTIDSDFGKKQQKKGDNHDSSATYEIKFHEFVLFILEEKMGATRRTFLTDLARKKGFRVENELTDEVTHIVAENLSRSEVLAWLKEHKMEKTKQFELLDISWLIESMKVGKPVDTKGKYQLAESVEVSANPDPTEGRVNELPPTMKTVSPYACQRRTTLNNRNQRFTDSLEILRMNYVFKGNLDKALGFRRAISVLKSLPFEVRSLKDTEGLPWISDEVKGIMEEIIEVGESREVQAVLNDEWYQSFHAFTRVFGVGVGTADKWYQMGLRTLEDVRSSKTLKLTTWAKVGLTYYEDLARGVTRAEADAIWLLVQDAVATFDPDAIVEIVGGQRRGKPQSHDVDLLISSPGAEKEQEDQLLQKVMNLWKKQGLLLCGKVYWSQWEWGGLPSGKADEGDGEASCFLILKLYDHLVRKSKHNMPTGSNMGESKPWKAIKVDLLRCPRGSFAFAMLQWTGSRMFRRDLRDYAREEKNMMLDNHSLYDMTRGIQLPAKSEEEIFEHLGLEYLEPFYRNA

SEQ ID NO: 5465 - DNA, 1587 bp, synthetic construct
  misc_feature 1..1587: note = Variant of terminal deoxynucleotidyltransferase
  source 1..1587: mol_type = other DNA
atgcaccatcatcatcatcatggcggtagcggcagccacggcattcgtaccatcgattcggacttcgggaagaaacagcagaaaaaaggcgataaccacgatagttccgccacttatgaaatcaaatttcacgagtttgtgctgttcattctcgaagaaaaaatgggtgcgacgcgtcgtacttttctgacagatttagcccgcaagaaagggttccgcgtcgagaatgaactgaccgacgaagttacccacatcgtggcagaaaatctgtcacgctctgaagtattggcttggctgaaagaacacaagatggagaagaccaagcaattcgaactgctggatattagctggcttatcgaaagcatgaaagttggtaaaccggtggacaccaaggggaaataccagttggcggaatcggttgaggtgagtgcgaacccagatccgacagaaggtcgtgtaaacgagctgcctcctactatgaaaaccgtttctccgtatgcgtgtcaacgccgcaccaccctgaacaaccgcaatcaacgttttacggactcgctggagattcttcgcgaaaattacgtgtttaaaggcaacgacgatactgcgctggggtttcgtcgtgctatctccgtgctgaaaagccttccgtttgaggtacgtagcctgaaagacacggaaggattgccctggatcagtgatgaagtcaaagggattatggaagaaatcatcgaagtcggggagtcgcgtgaagtgcaggccgtgctcaatgatgagtggtatcaaagcttccacgcatttacgcgtgtctttggagtgggggtaggcacagcagacaagtggtaccagatgggtctgcgcaccctggaggatgttcgttccagcaagaccctgaagttgaccacgtgggcgaaagtaggtctgacgtattatgaagatcttgctcgcggcgttacccgtgcggaagctgacgcgatttggctgctggttcaggatgcagtcgcaactttcgacccggatgcgatcgtggagattgtcggtggacagcgtcgtgggaaacctcagtctcacgacgttgatctgcttatcagttctccgggagctgaaaaagagcaagaagaccaactcctgcagaaagtgatgcgcctgtggaagaaacaagggttgttgctgtgtggtaaagtgtattggagtcagtgggaatgggggggtctgccgtccggtaaggctgatgagggtgacggggaggcatcgtgctttctgatcctcaaactttatgatcatctggtgcgtaaaagtaaacataatatgccgactggttcgaacatgggcgagtccaaaccgtggaaagcaattaaagtagatctgctgcgttgcccccgcggcagttttgcgtttgcgatgttgcagtggaccggaagccgcatgttccgtcgcgatctgcgcgattacgcccgcgaagagaagaacatgatgctggacaatcatagcctgtatgacatgactcgtggtatccaactccctgctaaatcggaagaggaaattttcgaacatctggggcttgaatacctggaaccgttctatcgtaacgca

SEQ ID NO: 5466 - protein, 529 aa, synthetic construct
  REGION 1..529: note = Variant of terminal deoxynucleotidyltransferase
MHHHHHHGGSGSHGIRTIDSDFGKKQQKKGDNHDSSATYEIKFHEFVLFILEEKMGATRRTFLTDLARKKGFRVENELTDEVTHIVAENLSRSEVLAWLKEHKMEKTKQFELLDISWLIESMKVGKPVDTKGKYQLAESVEVSANPDPTEGRVNELPPTMKTVSPYACQRRTTLNNRNQRFTDSLEILRENYVFKGNDDTALGFRRAISVLKSLPFEVRSLKDTEGLPWISDEVKGIMEEIIEVGESREVQAVLNDEWYQSFHAFTRVFGVGVGTADKWYQMGLRTLEDVRSSKTLKLTTWAKVGLTYYEDLARGVTRAEADAIWLLVQDAVATFDPDAIVEIVGGQRRGKPQSHDVDLLISSPGAEKEQEDQLLQKVMRLWKKQGLLLCGKVYWSQWEWGGLPSGKADEGDGEASCFLILKLYDHLVRKSKHNMPTGSNMGESKPWKAIKVDLLRCPRGSFAFAMLQWTGSRMFRRDLRDYAREEKNMMLDNHSLYDMTRGIQLPAKSEEEIFEHLGLEYLEPFYRNA

SEQ ID NO: 5467 - DNA, 1671 bp, synthetic construct
  misc_feature 1..1671: note = Variant of IPP - TdT fusion protein
  source 1..1671: mol_type = other DNA
atgcatcaccatcaccatcacggtggcagcggtatggcgtttgaaaacaaaattgtggaagcattcatcgaaattccgaccggtagccagaataagtatgagttcgataaagaacgtggcgtctttaaactggaccgcgtgttatactcgccaatgttctatcctgccgagtacggatatctgcaaaacacgcttgctttggatggtgatccgctggacatcctcgttatcactactaatccgacatttccagggtgcgtaattgatacgcgcgttattggctttctgaacatggtggatagtggcgaagaagacgcgaaactgattggtgtacccgtcgaagatccgcgttttgacgaagtgcgctccatcgaagatttaccgcagcataaactgaaggagatcgcccacttcttcgaacgttacaaagatttgcagggcaaacgcaccgaaattggtacctgggaaggcccagaagcagcggcgaaactgattgacgaatgtatcgcccgttataatgagcaaaacaagaagggtagcggtggcactggtcctcctactatgaaaaccgtttctccgtatgcgtgtcaacgccgcaccaccctgaacaaccgtaatcaacgttttacggactcgctggagattcttcgcgagaattacgtgtttaaaggcaacgacgatactgcgctggaatttcgtcgtgctatctccgtgctgaaaagccttccgtttgaggtacgtagcctgaaagacacggaaggattgccctggatcagtgatgaagtcaaagggattatggaagaaatcatcgaagtcggggagtcgcgtgaagtgcaggccgtgctcaatgatgagtggtatcaaagcttccacgcatttacgcgtgtctttggagtgggggtgaagacagcagacaagtggtaccgcatgggtctgcgcaccctggaggatgttcgttccagcaagaccctgaagttgaccacgtgggcgaaagtaggtctgacgtattatgaagatcttgctcgcggcgttacccgtgcggaagctgacgcgatttggctgctggttcaggatgcagtcgcaactttcgacccggatgcgatcgtggagattgtcggtggacagcgtcgtgggaaacctcagtctcacgacgttgatctgcttatcagttctccgggagctgaaaaagagcaagaagaccaactcctgcagaaagtgatgaatctgtggaagaaacaagggttgttgctgtgtggtaaagtggtgtggagtcagtgggaatgggggggtctgccgtccggtaaggctgatgagggtgacggggaggcatcgtgctttctgatcctcaaactttatgatcatctggtgcgtaaaagtaaacataatatgccgactggttcgaacatgggcgagtccaaaccgtggaaagcaattaaagtagatctgctgcgttgcccccgcggcagttttgcgtttgcgatgttgcagtggaccggaagccgcatgttccgtcgcgatctgcgcgattacgcccgcgaagagaagaacatgatgctggacaatcatagcctgtatgacatgactcgtggtatccaactccctgctaaatcggaagaggaaattttcgaacatctggggcttgaatacctggaaccgttcgaacgtaacgca

SEQ ID NO: 5468 - protein, 557 aa, synthetic construct
  REGION 1..557: note = Variant of IPP - TdT fusion protein
MHHHHHHGGSGMAFENKIVEAFIEIPTGSQNKYEFDKERGVFKLDRVLYSPMFYPAEYGYLQNTLALDGDPLDILVITTNPTFPGCVIDTRVIGFLNMVDSGEEDAKLIGVPVEDPRFDEVRSIEDLPQHKLKEIAHFFERYKDLQGKRTEIGTWEGPEAAAKLIDECIARYNEQNKKGSGGTGPPTMKTVSPYACQRRTTLNNRNQRFTDSLEILRENYVFKGNDDTALEFRRAISVLKSLPFEVRSLKDTEGLPWISDEVKGIMEEIIEVGESREVQAVLNDEWYQSFHAFTRVFGVGVKTADKWYRMGLRTLEDVRSSKTLKLTTWAKVGLTYYEDLARGVTRAEADAIWLLVQDAVATFDPDAIVEIVGGQRRGKPQSHDVDLLISSPGAEKEQEDQLLQKVMNLWKKQGLLLCGKVVWSQWEWGGLPSGKADEGDGEASCFLILKLYDHLVRKSKHNMPTGSNMGESKPWKAIKVDLLRCPRGSFAFAMLQWTGSRMFRRDLRDYAREEKNMMLDNHSLYDMTRGIQLPAKSEEEIFEHLGLEYLEPFERNA

SEQ ID NO: 5469 - DNA, 1686 bp, synthetic construct
  misc_feature 1..1686: note = Variant of IPP - TdT fusion protein
  source 1..1686: mol_type = other DNA
atgcatcaccatcaccatcacggtggcagcggtatgaaattaggtccgggaaagaaagcaccagatgaaattaacgtgctgatcgagattccgatgaatagcaacatcaagtatgaatacgacgaagaagaagaggtcatcaaagttgatcgcgtgctgtatacctcgatggtctacccctttaattatggcttcattccggatacgttggaagaagacggtgatcctctggacgttcttgtactgggcaactacagtttactcccggggactgtgattgaagctcgtccagttggcatcgtgtacatgaaagatgaggaaggtgaggacgcgaagattgtagccgtcccgcgcgataagaccgatccgacgttctccaacatcaaagacgtgaatgatttgccacaggcgatcaagaacaagatcattcatttctttgagcactataaagaactggaacctggcaaatgggtgaagatttctgggtggggaagcgcctcagaagcgaaagagcgtatcaagaaagcaattgagcgcaagaagaataagggtagcggtggcactggtcctcctactatgaaaaccgtttctccgtatgcgtgtcaacgccgcaccaccctgaacaaccgtaatcaacgttttacggactcgctggagattcttcgcgagaattacgtgtttaaaggcaacgacgatactgcgctggaatttcgtcgtgctatctccgtgctgaaaagccttccgtttgaggtacgtagcctgaaagacacggaaggattgccctggatcagtgatgaagtcaaagggattatggaagaaatcatcgaagtcggggagtcgcgtgaagtgcaggccgtgctcaatgatgagtggtatcaaagcttccacgcatttacgcgtgtctttggagtgggggtgaagacagcagacaagtggtaccgcatgggtctgcgcaccctggaggatgttcgttccagcaagaccctgaagttgaccacgtgggcgaaagtaggtctgacgtattatgaagatcttgctcgcggcgttacccgtgcggaagctgacgcgatttggctgctggttcaggatgcagtcgcaactttcgacccggatgcgatcgtggagattgtcggtggacagcgtcgtgggaaacctcagtctcacgacgttgatctgcttatcagttctccgggagctgaaaaagagcaagaagaccaactcctgcagaaagtgatgaatctgtggaagaaacaagggttgttgctgtgtggtaaagtggtgtggagtcagtgggaatgggggggtctgccgtccggtaaggctgatgagggtgacggggaggcatcgtgctttctgatcctcaaactttatgatcatctggtgcgtaaaagtaaacataatatgccgactggttcgaacatgggcgagtccaaaccgtggaaagcaattaaagtagatctgctgcgttgcccccgcggcagttttgcgtttgcgatgttgcagtggaccggaagccgcatgttccgtcgcgatctgcgcgattacgcccgcgaagagaagaacatgatgctggacaatcatagcctgtatgacatgactcgtggtatccaactccctgctaaatcggaagaggaaattttcgaacatctggggcttgaatacctggaaccgttcgaacgtaacgca

SEQ ID NO: 5470 - protein, 562 aa, synthetic construct
  REGION 1..562: note = Variant of IPP - TdT fusion protein
MHHHHHHGGSGMKLGPGKKAPDEINVLIEIPMNSNIKYEYDEEEEVIKVDRVLYTSMVYPFNYGFIPDTLEEDGDPLDVLVLGNYSLLPGTVIEARPVGIVYMKDEEGEDAKIVAVPRDKTDPTFSNIKDVNDLPQAIKNKIIHFFEHYKELEPGKWVKISGWGSASEAKERIKKAIERKKNKGSGGTGPPTMKTVSPYACQRRTTLNNRNQRFTDSLEILRENYVFKGNDDTALEFRRAISVLKSLPFEVRSLKDTEGLPWISDEVKGIMEEIIEVGESREVQAVLNDEWYQSFHAFTRVFGVGVKTADKWYRMGLRTLEDVRSSKTLKLTTWAKVGLTYYEDLARGVTRAEADAIWLLVQDAVATFDPDAIVEIVGGQRRGKPQSHDVDLLISSPGAEKEQEDQLLQKVMNLWKKQGLLLCGKVVWSQWEWGGLPSGKADEGDGEASCFLILKLYDHLVRKSKHNMPTGSNMGESKPWKAIKVDLLRCPRGSFAFAMLQWTGSRMFRRDLRDYAREEKNMMLDNHSLYDMTRGIQLPAKSEEEIFEHLGLEYLEPFERNA

SEQ ID NO: 5471 - DNA, 1683 bp, synthetic construct
  misc_feature 1..1683: note = Variant of IPP - TdT fusion protein
  source 1..1683: mol_type = other DNA
atgaaattaggtccgggaaagaaagcaccagatgaaattaacgtgctgatcgagattccgatgaatagcaacatcaagtatgaatacgacgaagaagaagaggtcatcaaagttgatcgcgtgctgtatacctcgatggtctacccctttaattatggcttcattccggatacgttggaagaagacggtgatcctctggacgttcttgtactgggcaactacagtttactcccggggactgtgattgaagctcgtccagttggcatcgtgtacatgaaagatgaggaaggtgaggacgcgaagattgtagccgtcccgcgcgataagaccgatccgacgttctccaacatcaaagacgtgaatgatttgccacaggcgatcaagaacaagatcattcatttctttgagcactataaagaactggaacctggcaaatgggtgaagatttctgggtggggaagcgcctcagaagcgaaagagcgtatcaagaaagcaattgagcgcaagaagaataagggtggctccggccaccatcatcaccatcacggtagcggtggcactggtcctcctactatgaaaaccgtttctccgtatgcgtgtcaacgccgcaccaccctgaacaaccgtaatcaacgttttacggactcgctggagattcttcgcgagaattacgtgtttaaaggcaacgacgatactgcgctggaatttcgtcgtgctatctccgtgctgaaaagccttccgtttgaggtacgtagcctgaaagacacggaaggattgccctggatcagtgatgaagtcaaagggattatggaagaaatcatcgaagtcggggagtcgcgtgaagtgcaggccgtgctcaatgatgagtggtatcaaagcttccacgcatttacgcgtgtctttggagtgggggtgaagacagcagacaagtggtaccgcatgggtctgcgcaccctggaggatgttcgttccagcaagaccctgaagttgaccacgtgggcgaaagtaggtctgacgtattatgaagatcttgctcgcggcgttacccgtgcggaagctgacgcgatttggctgctggttcaggatgcagtcgcaactttcgacccggatgcgatcgtggagattgtcggtggacagcgtcgtgggaaacctcagtctcacgacgttgatctgcttatcagttctccgggagctgaaaaagagcaagaagaccaactcctgcagaaagtgatgaatctgtggaagaaacaagggttgttgctgtgtggtaaagtggtgtggagtcagtgggaatgggggggtctgccgtccggtaaggctgatgagggtgacggggaggcatcgtgctttctgatcctcaaactttatgatcatctggtgcgtaaaagtaaacataatatgccgactggttcgaacatgggcgagtccaaaccgtggaaagcaattaaagtagatctgctgcgttgcccccgcggcagttttgcgtttgcgatgttgcagtggaccggaagccgcatgttccgtcgcgatctgcgcgattacgcccgcgaagagaagaacatgatgctggacaatcatagcctgtatgacatgactcgtggtatccaactccctgctaaatcggaagaggaaattttcgaacatctggggcttgaatacctggaaccgttcgaacgtaacgca

SEQ ID NO: 5472 - protein, 561 aa, synthetic construct
  REGION 1..561: note = Variant of IPP - TdT fusion protein
MKLGPGKKAPDEINVLIEIPMNSNIKYEYDEEEEVIKVDRVLYTSMVYPFNYGFIPDTLEEDGDPLDVLVLGNYSLLPGTVIEARPVGIVYMKDEEGEDAKIVAVPRDKTDPTFSNIKDVNDLPQAIKNKIIHFFEHYKELEPGKWVKISGWGSASEAKERIKKAIERKKNKGGSGHHHHHHGSGGTGPPTMKTVSPYACQRRTTLNNRNQRFTDSLEILRENYVFKGNDDTALEFRRAISVLKSLPFEVRSLKDTEGLPWISDEVKGIMEEIIEVGESREVQAVLNDEWYQSFHAFTRVFGVGVKTADKWYRMGLRTLEDVRSSKTLKLTTWAKVGLTYYEDLARGVTRAEADAIWLLVQDAVATFDPDAIVEIVGGQRRGKPQSHDVDLLISSPGAEKEQEDQLLQKVMNLWKKQGLLLCGKVVWSQWEWGGLPSGKADEGDGEASCFLILKLYDHLVRKSKHNMPTGSNMGESKPWKAIKVDLLRCPRGSFAFAMLQWTGSRMFRRDLRDYAREEKNMMLDNHSLYDMTRGIQLPAKSEEEIFEHLGLEYLEPFERNA

SEQ ID NO: 5473 - DNA, 1668 bp, synthetic construct
  misc_feature 1..1668: note = Variant of IPP - TdT fusion protein
  source 1..1668: mol_type = other DNA
atggcgtttgaaaacaaaattgtggaagcattcatcgaaattccgaccggtagccagaataagtatgagttcgataaagaacgtggcgtctttaaactggaccgcgtgttatactcgccaatgttctatcctgccgagtacggatatctgcaaaacacgcttgctttggatggtgatccgctggacatcctcgttatcactactaatccgacatttccagggtgcgtaattgatacgcgcgttattggctttctgaacatggtggatagtggcgaagaagacgcgaaactgattggtgtacccgtcgaagatccgcgttttgacgaagtgcgctccatcgaagatttaccgcagcataaactgaaggagatcgcccacttcttcgaacgttacaaagatttgcagggcaaacgcaccgaaattggtacctgggaaggcccagaagcagcggcgaaactgattgacgaatgtatcgcccgttataatgagcaaaacaagaagggtggctccggccaccatcatcaccatcacggtagcggtggcactggtcctcctactatgaaaaccgtttctccgtatgcgtgtcaacgccgcaccaccctgaacaaccgtaatcaacgttttacggactcgctggagattcttcgtgaaaattacgagctgaaaggcaacgacgatactgcgctggaatttcgtcgtgctatctccgtgctgaaaagccttccgtttgaggtacgtagcctgaaagacacggaaggattgccctggatcagtgatgaagtcaaagggattatggaagaaatcatcgaagtcggggagtcgcgtgaagtgcaggccgtgctcaatgatgagtggtatcaaagcttccacgcatttacgcgtgtctttggagtgggggtgaagacagcagacaagtggtaccgtatgggtctgcgcaccctcgaggatgttcgttccagcaagaccctgaagttgaccccgtggcagaaagtaggtctgctgtattatgaagatcttgctcgcggcgttacgcgtgccgaagctgacgcgatttggctgctggttcaggatgcagtcgcaactttcgacccggatgcgatcgtggagattgtcggtggatttcgtcgtgggaaacctcagggtcacgacgttgatctgcttatcagttctccgggagctgaaaaagagcaagaagaccaactcctgcagaaagtgatgaatctgtggaagaaacaagggttgttgctgtgtggtcgtctggaatggagtcagtgggaatgggggggttcgccttccggtaaggctgatgagggtgacgcggaggcgtcgtgctttctgatcctcaaactttatgatcatctggtgcgtaaaagtaaacgcaatatgccgactggttcgaacatgggcgagtccaaaccgtggaaagcaattaaagtagatctgctgcgttgcccccgcggcagttttgcgtttgcgatgttgcagtggaccggaagccgcatgttccgtcgtgatctgcgctggtacgccctggaagagaagaacatgatgctggacaatcattcgctgtatgacatgactcgtggtatccaactccctgctaaatcggaagaggaaattttcgaacatctggggcttgaatacctggaaccgttcgaacgtaacgca

SEQ ID NO: 5474 - protein, 556 aa, synthetic construct
  REGION 1..556: note = Variant of IPP - TdT fusion protein
MAFENKIVEAFIEIPTGSQNKYEFDKERGVFKLDRVLYSPMFYPAEYGYLQNTLALDGDPLDILVITTNPTFPGCVIDTRVIGFLNMVDSGEEDAKLIGVPVEDPRFDEVRSIEDLPQHKLKEIAHFFERYKDLQGKRTEIGTWEGPEAAAKLIDECIARYNEQNKKGGSGHHHHHHGSGGTGPPTMKTVSPYACQRRTTLNNRNQRFTDSLEILRENYELKGNDDTALEFRRAISVLKSLPFEVRSLKDTEGLPWISDEVKGIMEEIIEVGESREVQAVLNDEWYQSFHAFTRVFGVGVKTADKWYRMGLRTLEDVRSSKTLKLTPWQKVGLLYYEDLARGVTRAEADAIWLLVQDAVATFDPDAIVEIVGGFRRGKPQGHDVDLLISSPGAEKEQEDQLLQKVMNLWKKQGLLLCGRLEWSQWEWGGSPSGKADEGDAEASCFLILKLYDHLVRKSKRNMPTGSNMGESKPWKAIKVDLLRCPRGSFAFAMLQWTGSRMFRRDLRWYALEEKNMMLDNHSLYDMTRGIQLPAKSEEEIFEHLGLEYLEPFERNA

SEQ ID NO: 5475 - DNA, 1587 bp, synthetic construct
  misc_feature 1..1587: note = Variant of terminal deoxynucleotidyltransferase
  source 1..1587: mol_type = other DNA
atgcaccatcatcatcatcatggcggtagcggcagccacggcattcgtaccatcgattcggacttcgggaagaaacagcagaaaaaaggcgataaccacgatagttccgccacttatgaaatcaaatttcacgagtttgtgctgttcattctcgaagaaaaaatgggtgcgacgcgtcgtacttttctgacagatttagcccgcaagaaagggttccgcgtcgagaatgaactgaccgacgaagttacccacatcgtggcagaaaatctgtcacgctctgaagtattggcttggctgaaagaacacaagatggagaagaccaagcaattcgaactgctggatattagctggcttatcgaaagcatgaaagttggtaaaccggtggacaccaaggggaaataccagttggcggaatcggttgaggtgagtgcgaacccagatccgacagaaggtcgtgtaaacgagctgcctcctactatgaaaaccgtttctccgtatgcgtgtcaacgccgcaccaccctgaacaaccgtaatcaacgttttacggactcgctggagattcttcgtgaaaattacgagctgaaaggcaacgatgataaggcgctggaatttcgtcgtgctatctccgtgctgaaaagccttccgtttgaggtacgtagcctgaaagacacggaaggattgccctggatcagtgatgaagtcaaagggattatggaagaaatcatcgaagtcggggagtcgcgtgaagtgcaggccgtgctcaatgatgagtggtatcaaagcttccacgcatttacgcgtgtctttggagtgggggtgaagacagcagacaagtggtaccgtatgggtctgcgcaccctcgaggatgttcgttccagcaagaccctgaagttgaccccgatgcagaaagtaggtctgctgtattatgaagatcttgctcgcggcgttacgcgtgccgaagctgacgcgatttggctgctggttcaggatgcagtcgcaactttcgacccggatgcgatcgtggagattgtcggtggatttcgtcgtgggaaacctcagggtcacgacgttgatctgcttatcagttctccgggagctgagaaagagcaagaagaccaactcctgcagaaagtgatgaatctgtggaagaaacaagggttgttgctgtgtggtcgtctggaatggagtcagtgggaagatgggggttcgccttccggtaaggctgatgagggtgacgcggaggcgtcgtgctttctgatcctcaaactttatgatcatctggtgcgtaaaagtaaacgcaatatgccgactggttcgaacatgggcgagtccaaaccgtggaaagcaattaaagtagatctgctgcgttgcccctatggcagttttgcgtttgcgatgttgcagtggaccggaagccgcatgttccgtcgtgatctgcgctggtacgccctggaagagaagaacatgatgctggacaatcattcgctgtatgacatgacccgcggtatcttcctccctgctaaatcggaagaggaaattttcgaacatctggggcttgaatacctggaaccgttcgaacgtaacgca

SEQ ID NO: 5476 - protein, 529 aa, synthetic construct
  REGION 1..529: note = Variant of terminal deoxynucleotidyltransferase
MHHHHHHGGSGSHGIRTIDSDFGKKQQKKGDNHDSSATYEIKFHEFVLFILEEKMGATRRTFLTDLARKKGFRVENELTDEVTHIVAENLSRSEVLAWLKEHKMEKTKQFELLDISWLIESMKVGKPVDTKGKYQLAESVEVSANPDPTEGRVNELPPTMKTVSPYACQRRTTLNNRNQRFTDSLEILRENYELKGNDDKALEFRRAISVLKSLPFEVRSLKDTEGLPWISDEVKGIMEEIIEVGESREVQAVLNDEWYQSFHAFTRVFGVGVKTADKWYRMGLRTLEDVRSSKTLKLTPMQKVGLLYYEDLARGVTRAEADAIWLLVQDAVATFDPDAIVEIVGGFRRGKPQGHDVDLLISSPGAEKEQEDQLLQKVMNLWKKQGLLLCGRLEWSQWEDGGSPSGKADEGDAEASCFLILKLYDHLVRKSKRNMPTGSNMGESKPWKAIKVDLLRCPYGSFAFAMLQWTGSRMFRRDLRWYALEEKNMMLDNHSLYDMTRGIFLPAKSEEEIFEHLGLEYLEPFERNA

SEQ ID NO: 5477 - DNA, 19 bp, synthetic construct
  misc_feature 1..19: note = Modified oligo substrate or product
  modified_base 1: mod_base = OTHER; note = 5'-6-carboxyfluorescein-thymidine
  modified_base 16: mod_base = OTHER; note = 2'-O-methyladenosine
  modified_base 17: mod_base = OTHER; note = 2'-O-methyluridine
  modified_base 18: mod_base = OTHER; note = 2'-O-methylcytidine
  modified_base 19: mod_base = OTHER; note = 2'-O-methyluridine
  source 1..19: mol_type = other DNA
nttttttttttttttnnnn

SEQ ID NO: 5478 - DNA, 19 bp, synthetic construct
  misc_feature 1..19: note = Modified oligo substrate or product
  modified_base 16: mod_base = OTHER; note = 2'-O-methyladenosine
  modified_base 17: mod_base = OTHER; note = 2'-O-methyluridine
  modified_base 18: mod_base = OTHER; note = 2'-O-methylcytidine
  modified_base 19: mod_base = OTHER; note = 2'-O-methyluridine
  source 1..19: mol_type = other DNA
tttttttttttttttnnnn

SEQ ID NO: 5479 - DNA, 15 bp, synthetic construct
  misc_feature 1..15: note = Modified oligo substrate or product
  modified_base 1: mod_base = OTHER; note = 5'-6-carboxyfluorescein-thymidine
  modified_base 12: mod_base = OTHER; note = 2'-O-methyladenosine
  modified_base 13: mod_base = OTHER; note = 2'-O-methyladenosine
  modified_base 14: mod_base = OTHER; note = 2'-O-methyladenosine
  modified_base 15: mod_base = OTHER; note = 2'-deoxyfluorouridine
  source 1..15: mol_type = other DNA
nttttttttttnnnn

SEQ ID NO: 5480 - DNA, 22 bp, synthetic construct
  misc_feature 1..22: note = Modified oligo substrate or product
  modified_base 1: mod_base = OTHER; note = 5'-6-carboxyfluorescein-thymidine
  modified_base 19: mod_base = OTHER; note = 2'-O-methyladenosine
  modified_base 20: mod_base = OTHER; note = 2'-deoxyfluoroguanosine
  modified_base 21: mod_base = OTHER; note = 2'-O-methyladenosine
  modified_base 22: mod_base = OTHER; note = 2'-deoxyfluoroguanosine
  source 1..22: mol_type = other DNA
ntttttttttttttttttnnnn

SEQ ID NO: 5481 - DNA, 15 bp, synthetic construct
  misc_feature 1..15: note = Modified oligo substrate or product
  modified_base 1: mod_base = OTHER; note = 5'-6-carboxyfluorescein-thymidine
  modified_base 12: mod_base = OTHER; note = 2'-O-methylcytidine
  modified_base 13: mod_base = OTHER; note = 2'-O-methylcytidine
  modified_base 14: mod_base = OTHER; note = 2'-O-methyluridine
  modified_base 15: mod_base = OTHER; note = 2'-deoxyfluoroadenosine
  source 1..15: mol_type = other DNA
nttttttttttnnnn

SEQ ID NO: 5482 - DNA, 20 bp, synthetic construct
  misc_feature 1..20: note = Modified oligo substrate or product
  modified_base 16^17: mod_base = OTHER; note = there is a phosphorothioate bond between these bases
  modified_base 17^18: mod_base = OTHER; note = there is a phosphorothioate bond between these bases
  modified_base 1: mod_base = OTHER; note = 5'-6-carboxyfluorescein-thymidine
  modified_base 17: mod_base = OTHER; note = 2'-deoxyfluorocytidine
  modified_base 18: mod_base = OTHER; note = 2'-O-methyladenosine
  modified_base 19: mod_base = OTHER; note = 2'-deoxyfluoroadenosine
  modified_base 20: mod_base = OTHER; note = 2'-deoxyfluoroadenosine
  source 1..20: mol_type = other DNA
ntttttttttttttttnnnn

SEQ ID NO: 5483 - DNA, 36 bp, synthetic construct; identical to SEQ ID NO: 4001
  misc_feature 1..36: note = Modified oligo substrate or product
  modified_base 1: mod_base = OTHER; note = 5'-6-carboxyfluorescein-thymidine
  modified_base 33: mod_base = OTHER; note = 2'-O-methyladenosine
  modified_base 34: mod_base = OTHER; note = 2'-O-methyladenosine
  modified_base 35: mod_base = OTHER; note = 2'-O-methyladenosine
  modified_base 36: mod_base = OTHER; note = 2'-deoxyfluoroguanosine
  source 1..36: mol_type = other DNA

SEQ ID NO: 5484 - DNA, 20 bp, synthetic construct
  misc_feature 1..20: note = Modified oligo substrate or product
  modified_base 17^18: mod_base = OTHER; note = there is a phosphorothioate bond between these bases
  modified_base 18^19: mod_base = OTHER; note = there is a phosphorothioate bond between these bases
  modified_base 1: mod_base = OTHER; note = 5'-6-carboxyfluorescein-thymidine
  modified_base 18: mod_base = OTHER; note = 2'-O-methyladenosine
  modified_base 19: mod_base = OTHER; note = 2'-O-methylguanosine
  modified_base 20: mod_base = OTHER; note = 2'-O-methyladenosine
  source 1..20: mol_type = other DNA
nttttttttttttttttnnn

SEQ ID NO: 5485 - DNA, 30 bp, synthetic construct
  misc_feature 1..30: note = Modified oligo substrate or product
  modified_base 1: mod_base = OTHER; note = 5'-6-carboxyfluorescein-thymidine
  modified_base 27: mod_base = OTHER; note = 2'-O-methyluridine
  modified_base 28: mod_base = OTHER; note = 2'-deoxyfluoroguanosine
  modified_base 29: mod_base = OTHER; note = 2'-O-methyluridine
  modified_base 30: mod_base = OTHER; note = 2'-deoxyfluorocytidine
  source 1..30: mol_type = other DNA
ntttttttttttttttttttttttttnnnn

SEQ ID NO: 5486 - DNA, 35 bp, synthetic construct
  misc_feature 1..35: note = Modified oligo substrate or product
  modified_base 1: mod_base = OTHER; note = 5'-6-carboxyfluorescein-thymidine
  modified_base 32: mod_base = OTHER; note = 2'-O-methyluridine
  modified_base 33: mod_base = OTHER; note = 2'-deoxyfluorocytidine
  modified_base 34: mod_base = OTHER; note = 2'-O-methyladenosine
  modified_base 35: mod_base = OTHER; note = 2'-deoxyfluorouridine
  source 1..35: mol_type = other DNA
nttttttttttttttttttttttttttttttnnnn

SEQ ID NO: 5487 - DNA, 25 bp, synthetic construct
  misc_feature 1..25: note = Modified oligo substrate or product
  modified_base 1: mod_base = OTHER; note = 5'-6-carboxyfluorescein-thymidine
  modified_base 22: mod_base = OTHER; note = 2'-O-methyluridine
  modified_base 23: mod_base = OTHER; note = 2'-deoxyfluorocytidine
  modified_base 24: mod_base = OTHER; note = 2'-O-methyluridine
  modified_base 25: mod_base = OTHER; note = 2'-deoxyfluorocytidine
  source 1..25: mol_type = other DNA
nttttttttttttttttttttnnnn

SEQ ID NO: 5488 - DNA, 50 bp, synthetic construct; identical to SEQ ID NO: 3959
  misc_feature 1..50: note = Modified oligo substrate or product
  modified_base 47^48: mod_base = OTHER; note = there is a phosphorothioate bond between these bases
  modified_base 1: mod_base = OTHER; note = 5'-6-carboxyfluorescein-thymidine
  modified_base 48: mod_base = OTHER; note = 2'-O-methyladenosine
  modified_base 49: mod_base = OTHER; note = 2'-deoxyfluoroadenosine
  modified_base 50: mod_base = OTHER; note = 2'-deoxyfluoroadenosine
  source 1..50: mol_type = other DNA

SEQ ID NO: 5489 - DNA, 40 bp, synthetic construct; identical to SEQ ID NO: 3957
  misc_feature 1..40: note = Modified oligo substrate or product
  modified_base 38^39: mod_base = OTHER; note = there is a phosphorothioate bond between these bases
  modified_base 39^40: mod_base = OTHER; note = there is a phosphorothioate bond between these bases
  modified_base 1: mod_base = OTHER; note = 5'-6-carboxyfluorescein-thymidine
  modified_base 38: mod_base = OTHER; note = 2'-O-methylguanosine
  modified_base 39: mod_base = OTHER; note = 2'-O-methyladenosine
  modified_base 40: mod_base = OTHER; note = 2'-O-methylcytidine
  source 1..40: mol_type = other DNA

SEQ ID NO: 5490 - DNA, 50 bp, synthetic construct
  misc_feature 1..50: note = Modified oligo substrate or product
  modified_base 1: mod_base = OTHER; note = 5'-6-carboxyfluorescein-thymidine
  modified_base 47: mod_base = OTHER; note = 2'-O-methyladenosine
  modified_base 48: mod_base = OTHER; note = 2'-deoxyfluoroguanosine
  modified_base 49: mod_base = OTHER; note = 2'-O-methyluridine
  modified_base 50: mod_base = OTHER; note = 2'-deoxyfluoroguanosine
  source 1..50: mol_type = other DNA
ntttttttttttttttttttttttttttttttttttttttttttttnnnn

SEQ ID NO: 5491 - DNA, 45 bp, synthetic construct
  misc_feature 1..45: note = Modified oligo substrate or product
  modified_base 1: mod_base = OTHER; note = 5'-6-carboxyfluorescein-thymidine
  modified_base 42: mod_base = OTHER; note = 2'-O-methyladenosine
  modified_base 43: mod_base = OTHER; note = 2'-deoxyfluorouridine
  modified_base 44: mod_base = OTHER; note = 2'-deoxyfluorocytidine
  modified_base 45: mod_base = OTHER; note = 2'-deoxyfluorocytidine
  source 1..45: mol_type = other DNA
nttttttttttttttttttttttttttttttttttttttttnnnn

SEQ ID NO: 5492 - DNA, 35 bp, synthetic construct; identical to SEQ ID NO: 5486
  misc_feature 1..35: note = Modified oligo substrate or product
  modified_base 1: mod_base = OTHER; note = 5'-6-carboxyfluorescein-thymidine
  modified_base 32: mod_base = OTHER; note = 2'-O-methyladenosine
  modified_base 33: mod_base = OTHER; note = 2'-O-methyladenosine
  modified_base 34: mod_base = OTHER; note = 2'-O-methyladenosine
  modified_base 35: mod_base = OTHER; note = 2'-deoxyfluoroguanosine
  source 1..35: mol_type = other DNA

SEQ ID NO: 5493 - DNA, 60 bp, synthetic construct; identical to SEQ ID NO: 3955
  misc_feature 1..60: note = Modified oligo substrate or product
  modified_base 1: mod_base = OTHER; note = 5'-6-carboxyfluorescein-thymidine
  modified_base 58: mod_base = OTHER; note = 2'-O-methyluridine
  modified_base 59: mod_base = OTHER; note = 2'-O-methyluridine
  modified_base 60: mod_base = OTHER; note = 2'-deoxyfluorocytidine
  source 1..60: mol_type = other DNA

SEQ ID NO: 5494 - DNA, 45 bp, synthetic construct; identical to SEQ ID NO: 3958
  misc_feature 1..45: note = Modified oligo substrate or product
  modified_base 42^43: mod_base = OTHER; note = there is a phosphorothioate bond between these bases
  modified_base 43^44: mod_base = OTHER; note = there is a phosphorothioate bond between these bases
  modified_base 1: mod_base = OTHER; note = 5'-6-carboxyfluorescein-thymidine
  modified_base 43: mod_base = OTHER; note = 2'-O-methyladenosine
  modified_base 44: mod_base = OTHER; note = 2'-O-methylcytidine
  modified_base 45: mod_base = OTHER; note = 2'-O-methyluridine
  source 1..45: mol_type = other DNA

SEQ ID NO: 5495 - DNA, 55 bp, synthetic construct
  misc_feature 1..55: note = Modified oligo substrate or product
  modified_base 52^53: mod_base = OTHER; note = there is a phosphorothioate bond between these bases
  modified_base 53^54: mod_base = OTHER; note = there is a phosphorothioate bond between these bases
  modified_base 1: mod_base = OTHER; note = 5'-6-carboxyfluorescein-thymidine
  modified_base 52: mod_base = OTHER; note = 2'-O-methyluridine
  modified_base 53: mod_base = OTHER; note = 2'-deoxyfluoroadenosine
  modified_base 54: mod_base = OTHER; note = 2'-deoxyfluoroadenosine
  modified_base 55: mod_base = OTHER; note = 2'-deoxyfluoroguanosine
  source 1..55: mol_type = other DNA
nttttttttttttttttttttttttttttttttttttttttttttttttttnnnn

SEQ ID NO: 5496 - DNA, 15 bp, synthetic construct
  misc_feature 1..15: note = Modified oligo substrate or product
  modified_base 13^14: mod_base = OTHER; note = there is a phosphorothioate bond between these bases
  modified_base 14^15: mod_base = OTHER; note = there is a phosphorothioate bond between these bases
  modified_base 1: mod_base = OTHER; note = 5'-6-carboxyfluorescein-thymidine
  modified_base 13: mod_base = OTHER; note = 2'-O-methylcytidine
  modified_base 14: mod_base = OTHER; note = 2'-O-methyladenosine
  modified_base 15: mod_base = OTHER; note = 2'-O-methylguanosine
  source 1..15: mol_type = other DNA
ntttttttttttnnn

SEQ ID NO: 5497 - DNA, 25 bp, synthetic construct
  misc_feature 1..25: note = Modified oligo substrate or product
  modified_base 22^23: mod_base = OTHER; note = there is a phosphorothioate bond between these bases
  modified_base 1: mod_base = OTHER; note = 5'-6-carboxyfluorescein-thymidine
  modified_base 23: mod_base = OTHER; note = 2'-O-methylguanosine
  modified_base 24: mod_base = OTHER; note = 2'-O-methyladenosine
  modified_base 25: mod_base = OTHER; note = 2'-O-methyladenosine
  source 1..25: mol_type = other DNA
ntttttttttttttttttttttnnn

SEQ ID NO: 5498 - DNA, 30 bp, synthetic construct; identical to SEQ ID NO: 3954
  misc_feature 1..30: note = Modified oligo substrate or product
  modified_base 1: mod_base = OTHER; note = 5'-6-carboxyfluorescein-thymidine
  modified_base 28: mod_base = OTHER; note = 2'-O-methyladenosine
  modified_base 29: mod_base = OTHER; note = 2'-O-methyladenosine
  modified_base 30: mod_base = OTHER; note = 2'-O-methyladenosine
  source 1..30: mol_type = other DNA

SEQ ID NO: 5499 - DNA, 50 bp, synthetic construct; identical to SEQ ID NO: 3959
  misc_feature 1..50: note = Modified oligo substrate or product
  modified_base 47^48: mod_base = OTHER; note = there is a phosphorothioate bond between these bases
  modified_base 1: mod_base = OTHER; note = 5'-6-carboxyfluorescein-thymidine
  modified_base 48: mod_base = OTHER; note = 2'-O-methylcytidine
  modified_base 49: mod_base = OTHER; note = 2'-O-methyluridine
  modified_base 50: mod_base = OTHER; note = 2'-O-methyluridine
  source 1..50: mol_type = other DNA

SEQ ID NO: 5500 - DNA, 55 bp, synthetic construct; identical to SEQ ID NO: 3960
  misc_feature 1..55: note = Modified oligo substrate or product
  modified_base 1: mod_base = OTHER; note = 5'-6-carboxyfluorescein-thymidine
  modified_base 53: mod_base = OTHER; note = 2'-O-methyluridine
  modified_base 54: mod_base = OTHER; note = 2'-O-methyluridine
  modified_base 55: mod_base = OTHER; note = 2'-O-methyluridine
  source 1..55: mol_type = other DNA

SEQ ID NO: 5501 - DNA, 20 bp, synthetic construct
  misc_feature 1..20: note = Modified oligo substrate or product
  modified_base 17^18: mod_base = OTHER; note = there is a phosphorothioate bond between these bases
  modified_base 18^19: mod_base = OTHER; note = there is a phosphorothioate bond between these bases
  modified_base 1: mod_base = OTHER; note = 5'-6-carboxyfluorescein-thymidine
  modified_base 17: mod_base = OTHER; note = 2'-O-methylcytidine
  modified_base 18: mod_base = OTHER; note = 2'-O-methyladenosine
  modified_base 19: mod_base = OTHER; note = 2'-O-methylguanosine
  modified_base 20: mod_base = OTHER; note = 2'-O-methyladenosine
  source 1..20: mol_type = other DNA
ntttttttttttttttnnnn

SEQ ID NO: 5502 - DNA, 15 bp, synthetic construct
  misc_feature 1..15: note = Modified oligo substrate or product
  modified_base 13^14: mod_base = OTHER; note = there is a phosphorothioate bond between these bases
  modified_base 14^15: mod_base = OTHER; note = there is a phosphorothioate bond between these bases
  modified_base 1: mod_base = OTHER; note = 5'-6-carboxyfluorescein-thymidine
  modified_base 13: mod_base = OTHER; note = 2'-O-methylcytidine
  modified_base 14: mod_base = OTHER; note = 2'-O-methyladenosine
  modified_base 15: mod_base = OTHER; note = 2'-O-methylguanosine
  source 1..15: mol_type = other DNA
nttttttttttannn

SEQ ID NO: 5503 - DNA, 25 bp, synthetic construct
  misc_feature 1..25: note = Modified oligo substrate or product
  modified_base 21^22: mod_base = OTHER; note = there is a phosphorothioate bond between these bases
  modified_base 22^23: mod_base = OTHER; note = there is a phosphorothioate bond between these bases
  modified_base 1: mod_base = OTHER; note = 5'-6-carboxyfluorescein-thymidine
  modified_base 22: mod_base = OTHER; note = 2'-O-methyladenosine
  modified_base 23: mod_base = OTHER; note = 2'-O-methylguanosine
  modified_base 24: mod_base = OTHER; note = 2'-O-methyladenosine
  modified_base 25: mod_base = OTHER; note = 2'-O-methyladenosine
  source 1..25: mol_type = other DNA
nttttttttttttttttttttnnnn

SEQ ID NO: 5504 - DNA, 30 bp, synthetic construct; identical to SEQ ID NO: 5485
  misc_feature 1..30: note = Modified oligo substrate or product
  modified_base 26^27: mod_base = OTHER; note = there is a phosphorothioate bond between these bases
  modified_base 1: mod_base = OTHER; note = 5'-6-carboxyfluorescein-thymidine
  modified_base 27: mod_base = OTHER; note = 2'-O-methylguanosine
  modified_base 28: mod_base = OTHER; note = 2'-O-methyladenosine
  modified_base 29: mod_base = OTHER; note = 2'-O-methyladenosine
  modified_base 30: mod_base = OTHER; note = 2'-O-methyladenosine
  source 1..30: mol_type = other DNA

SEQ ID NO: 5505 - DNA, 40 bp, synthetic construct
  misc_feature 1..40: note = Modified oligo substrate or product
  modified_base 1: mod_base = OTHER; note = 5'-6-carboxyfluorescein-thymidine
  modified_base 37: mod_base = OTHER; note = 2'-O-methyladenosine
  modified_base 38: mod_base = OTHER; note = 2'-O-methyladenosine
  modified_base 39: mod_base = OTHER; note = 2'-deoxyfluoroguanosine
  modified_base 40: mod_base = OTHER; note = 2'-O-methyladenosine
  source 1..40: mol_type = other DNA
ntttttttttttttttttttttttttttttttttttnnnn

SEQ ID NO: 5506 - DNA, 45 bp, synthetic construct; identical to SEQ ID NO: 5491
  misc_feature 1..45: note = Modified oligo substrate or product
  modified_base 1: mod_base = OTHER; note = 5'-6-carboxyfluorescein-thymidine
  modified_base 42: mod_base = OTHER; note = 2'-deoxyfluoroguanosine
  modified_base 43: mod_base = OTHER; note = 2'-O-methyladenosine
  modified_base 44: mod_base = OTHER; note = 2'-deoxyfluoroguanosine
  modified_base 45: mod_base = OTHER; note = 2'-O-methyluridine
  source 1..45: mol_type = other DNA

SEQ ID NO: 5507 - DNA, 55 bp, synthetic construct; identical to SEQ ID NO: 5495
  misc_feature 1..55: note = Modified oligo substrate or product
  modified_base 1: mod_base = OTHER; note = 5'-6-carboxyfluorescein-thymidine
  modified_base 52: mod_base = OTHER; note = 2'-deoxyfluoroguanosine
  modified_base 53: mod_base = OTHER; note = 2'-O-methyluridine
  modified_base 54: mod_base = OTHER; note = 2'-deoxyfluoroguanosine
  modified_base 55: mod_base = OTHER; note = 2'-O-methyluridine
  source 1..55: mol_type = other DNA

SEQ ID NO: 5508 - DNA, 60 bp, synthetic construct
  misc_feature 1..60: note = Modified oligo substrate or product
  modified_base 1: mod_base = OTHER; note = 5'-6-carboxyfluorescein-thymidine
  modified_base 57: mod_base = OTHER; note = 2'-deoxyfluoroguanosine
  modified_base 58: mod_base = OTHER; note = 2'-O-methyluridine
  modified_base 59: mod_base = OTHER; note = 2'-deoxyfluorocytidine
  modified_base 60: mod_base = OTHER; note = 2'-O-methyluridine
  source 1..60: mol_type = other DNA
ntttttttttttttttttttttttttttttttttttttttttttttttttttttttnnnn

SEQ ID NO: 5509 - DNA, 20 bp, synthetic construct
  misc_feature 1..20: note = Modified oligo substrate or product
  modified_base 1: mod_base = OTHER; note = 5'-6-carboxyfluorescein-thymidine
  modified_base 17: mod_base = OTHER; note = 2'-O-methyladenosine
  modified_base 18: mod_base = OTHER; note = 2'-deoxyfluoroguanosine
  modified_base 19: mod_base = OTHER; note = 2'-O-methyladenosine
  modified_base 20: mod_base = OTHER; note = 2'-deoxyfluoroguanosine
  source 1..20: mol_type = other DNA
ntttttttttttttttnnnn

SEQ ID NO: 5510 - DNA, 35 bp, synthetic construct; identical to SEQ ID NO: 5486
  misc_feature 1..35: note = Modified oligo substrate or product
  modified_base 1: mod_base = OTHER; note = 5'-6-carboxyfluorescein-thymidine
  modified_base 32: mod_base = OTHER; note = 2'-O-methyluridine
  modified_base 33: mod_base = OTHER; note = 2'-deoxyfluorocytidine
  modified_base 34: mod_base = OTHER; note = 2'-O-methyladenosine
  modified_base 35: mod_base = OTHER; note = 2'-O-methyluridine
  source 1..35: mol_type = other DNA

SEQ ID NO: 5511 - DNA, 40 bp, synthetic construct; identical to SEQ ID NO: 5505
  misc_feature 1..40: note = Modified oligo substrate or product
  modified_base 1: mod_base = OTHER; note = 5'-6-carboxyfluorescein-thymidine
  modified_base 37: mod_base = OTHER; note = 2'-deoxyfluorocytidine
  modified_base 38: mod_base = OTHER; note = 2'-O-methyladenosine
  modified_base 39: mod_base = OTHER; note = 2'-O-methyluridine
  modified_base 40: mod_base = OTHER; note = 2'-O-methylcytidine
  source 1..40: mol_type = other DNA

SEQ ID NO: 5512 - DNA, 45 bp, synthetic construct; identical to SEQ ID NO: 5491
  misc_feature 1..45: note = Modified oligo substrate or product
  modified_base 1: mod_base = OTHER; note = 5'-6-carboxyfluorescein-thymidine
  modified_base 42: mod_base = OTHER; note = 2'-O-methyladenosine
  modified_base 43: mod_base = OTHER; note = 2'-O-methyluridine
  modified_base 44: mod_base = OTHER; note = 2'-O-methylcytidine
  modified_base 45: mod_base = OTHER; note = 2'-O-methyluridine
  source 1..45: mol_type = other DNA

SEQ ID NO: 5513 - DNA, 50 bp, synthetic construct; identical to SEQ ID NO: 5490
  misc_feature 1..50: note = Modified oligo substrate or product
  modified_base 1: mod_base = OTHER; note = 5'-6-carboxyfluorescein-thymidine
  modified_base 47: mod_base = OTHER; note = 2'-O-methyluridine
  modified_base 48: mod_base = OTHER; note = 2'-O-methylcytidine
  modified_base 49: mod_base = OTHER; note = 2'-O-methyluridine
  modified_base 50: mod_base = OTHER; note = 2'-O-methyluridine
  source 1..50: mol_type = other DNA

SEQ ID NO: 5514 - DNA, 55 bp, synthetic construct; identical to SEQ ID NO: 5495
  misc_feature 1..55: note = Modified oligo substrate or product
  modified_base 1: mod_base = OTHER; note = 5'-6-carboxyfluorescein-thymidine
  modified_base 52: mod_base = OTHER; note = 2'-O-methylcytidine
  modified_base 53: mod_base = OTHER; note = 2'-O-methyluridine
  modified_base 54: mod_base = OTHER; note = 2'-O-methyluridine
  modified_base 55: mod_base = OTHER; note = 2'-O-methyladenosine
  source 1..55: mol_type = other DNA

SEQ ID NO: 5515 - DNA, 15 bp, synthetic construct
  misc_feature 1..15: note = Modified oligo substrate or product
  modified_base 1: mod_base = OTHER; note = 5'-6-carboxyfluorescein-thymidine
  modified_base 13: mod_base = OTHER; note = 2'-O-methyladenosine
  modified_base 14: mod_base = OTHER; note = 2'-O-methylguanosine
  modified_base 15: mod_base = OTHER; note = 2'-O-(2-methoxyethyl)cytidine
  source 1..15: mol_type = other DNA
ntttttttttttnnn

SEQ ID NO: 5516 - DNA, 30 bp, synthetic construct; identical to SEQ ID NO: 5485
  misc_feature 1..30: note = Modified oligo substrate or product
  modified_base 29^30: mod_base = OTHER; note = there is a phosphorothioate bond between these bases
  modified_base 1: mod_base = OTHER; note = 5'-6-carboxyfluorescein-thymidine
  modified_base 27: mod_base = OTHER; note = 2'-O-methylcytidine
  modified_base 28: mod_base = OTHER; note = 2'-O-methylcytidine
  modified_base 29: mod_base = OTHER; note = 2'-O-methyluridine
  modified_base 30: mod_base = OTHER; note = 2'-O-methyluridine
  source 1..30: mol_type = other DNA

SEQ ID NO: 5517 - DNA, 25 bp, synthetic construct
  misc_feature 1..25: note = Modified oligo substrate or product
  modified_base 21^22: mod_base = OTHER; note = there is a phosphorothioate bond between these bases
  modified_base 22^23: mod_base = OTHER; note = there is a phosphorothioate bond between these bases
  modified_base 1: mod_base = OTHER; note = 5'-6-carboxyfluorescein-thymidine
  modified_base 22: mod_base = OTHER; note = 2'-deoxyfluoroadenosine
  modified_base 23: mod_base = OTHER; note = 2'-deoxyfluoroadenosine
  modified_base 24: mod_base = OTHER; note = 2'-deoxyfluoroguanosine
  modified_base 25: mod_base = OTHER; note = 2'-O-methyladenosine
  source 1..25: mol_type = other DNA
nttttttttttttttttttttnnnn

SEQ ID NO: 5518 - DNA, 19 bp, synthetic construct
  misc_feature 1..19: note = Modified oligo substrate or product
  modified_base 17^18: mod_base = OTHER; note = there is a phosphorothioate bond between these bases
  modified_base 1: mod_base = OTHER; note = 5'-6-carboxyfluorescein-thymidine
  modified_base 16: mod_base = OTHER; note = 2'-O-methyladenosine
  modified_base 17: mod_base = OTHER; note = 2'-O-methyluridine
  modified_base 18: mod_base = OTHER; note = 2'-O-methylguanosine
  modified_base 19: mod_base = OTHER; note = 2'-deoxyfluoroadenosine with a 3'-PO4 blocking group
  source 1..19: mol_type = other DNA
nttttttttttttttnnnn

SEQ ID NO: 5519 - DNA, 20 bp, synthetic construct
  misc_feature 1..20: note = Modified oligo substrate or product
  modified_base 1: mod_base = OTHER; note = 5'-6-carboxyfluorescein-thymidine
  modified_base 16: mod_base = OTHER; note = 2'-O-methyladenosine
  modified_base 17: mod_base = OTHER; note = 2'-O-methyluridine
  modified_base 18: mod_base = OTHER; note = 2'-O-methylcytidine
  modified_base 19: mod_base = OTHER; note = 2'-O-methyluridine
  modified_base 20: mod_base = OTHER; note = 2'-deoxyfluoroadenosine with a 3'-PO4 blocking group
  source 1..20: mol_type = other DNA
nttttttttttttttnnnnn

SEQ ID NO: 5520 - DNA, 20 bp, synthetic construct
  misc_feature 1..20: note = Modified oligo substrate or product
  modified_base 16: mod_base = OTHER; note = 2'-O-methyladenosine
  modified_base 17: mod_base = OTHER; note = 2'-O-methyluridine
  modified_base 18: mod_base = OTHER; note = 2'-O-methylcytidine
  modified_base 19: mod_base = OTHER; note = 2'-O-methyluridine
  modified_base 20: mod_base = OTHER; note = 2'-deoxyfluoroadenosine with a 3'-PO4 blocking group
  source 1..20: mol_type = other DNA
tttttttttttttttnnnnn

SEQ ID NO: 5521 - DNA, 21 bp, synthetic construct
  misc_feature 1..21: note = Modified oligo substrate or product
  modified_base 17^18: mod_base = OTHER; note = there is a phosphorothioate bond between these bases
  modified_base 18^19: mod_base = OTHER; note = there is a phosphorothioate bond between these bases
  modified_base 1: mod_base = OTHER; note = 5'-6-carboxyfluorescein-thymidine
  modified_base 18: mod_base = OTHER; note = 2'-deoxyfluoroadenosine
  modified_base 19: mod_base = OTHER; note = 2'-deoxyfluoroadenosine
  modified_base 20: mod_base = OTHER; note = 2'-deoxyfluoroguanosine
  modified_base 21: mod_base = OTHER; note = 2'-O-methyladenosine with a 3'-PO4 blocking group
  source 1..21: mol_type = other DNA
nttttttttttttttttnnnn

SEQ ID NO: 5522 - DNA, 15 bp, synthetic construct
  misc_feature 1..15: note = Modified oligo substrate or product
  modified_base 12^13: mod_base = OTHER; note = there is a phosphorothioate bond between these bases
  modified_base 13^14: mod_base = OTHER; note = there is a phosphorothioate bond between these bases
  modified_base 14^15: mod_base = OTHER; note = there is a phosphorothioate bond between these bases
  modified_base 1: mod_base = OTHER; note = 5'-6-carboxyfluorescein-thymidine
  modified_base 12: mod_base = OTHER; note = 2'-O-methylcytidine
  modified_base 13: mod_base = OTHER; note = 2'-O-methyladenosine
  modified_base 14: mod_base = OTHER; note = 2'-O-methylguanosine
  modified_base 15: mod_base = OTHER; note = 2'-O-methyluridine with a 3'-PO4 blocking group
  source 1..15: mol_type = other DNA
nttttttttttnnnn

SEQ ID NO: 5523 - DNA, 15 bp, synthetic construct
  misc_feature 1..15: note = Modified oligo substrate or product
  modified_base 12^13: mod_base = OTHER; note = there is a phosphorothioate bond between these bases
  modified_base 13^14: mod_base = OTHER; note = there is a phosphorothioate bond between these bases
  modified_base 1: mod_base = OTHER; note = 5'-6-carboxyfluorescein-thymidine
  modified_base 12: mod_base = OTHER; note = 2'-O-methyluridine
  modified_base 13: mod_base = OTHER; note = 2'-deoxyfluoroadenosine
  modified_base 14: mod_base = OTHER; note = 2'-deoxyfluoroadenosine
  modified_base 15: mod_base = OTHER; note = 2'-O-methyladenosine with a 3'-PO4 blocking group
  source 1..15: mol_type = other DNA
nttttttttttnnnn

SEQ ID NO: 5524 - DNA, 16 bp, synthetic construct
  misc_feature 1..16: note = Modified oligo substrate or product
  modified_base 1: mod_base = OTHER; note = 5'-6-carboxyfluorescein-thymidine
  modified_base 12: mod_base = OTHER; note = 2'-O-methyladenosine
  modified_base 13: mod_base = OTHER; note = 2'-O-methyladenosine
  modified_base 14: mod_base = OTHER; note = 2'-O-methyladenosine
  modified_base 15: mod_base = OTHER; note = 2'-deoxyfluorouridine
  modified_base 16: mod_base = OTHER; note = 2'-O-methyluridine with a 3'-PO4 blocking group
  source 1..16: mol_type = other DNA
nttttttttttnnnnn

SEQ ID NO: 5525 - DNA, 23 bp, synthetic construct
  misc_feature 1..23: note = Modified oligo substrate or product
  modified_base 1: mod_base = OTHER; note = 5'-6-carboxyfluorescein-thymidine
  modified_base 19: mod_base = OTHER; note = 2'-O-methyladenosine
  modified_base 20: mod_base = OTHER; note = 2'-deoxyfluoroguanosine
  modified_base 21: mod_base = OTHER; note = 2'-O-methyladenosine
  modified_base 22: mod_base = OTHER; note = 2'-deoxyfluoroguanosine
  modified_base 23: mod_base = OTHER; note = 2'-O-methyladenosine with a 3'-PO4 blocking group
  source 1..23: mol_type = other DNA
ntttttttttttttttttnnnnn

SEQ ID NO: 5526 - DNA, 16 bp, synthetic construct
  misc_feature 1..16: note = Modified oligo substrate or product
  modified_base 1: mod_base = OTHER; note = 5'-6-carboxyfluorescein-thymidine
  modified_base 12: mod_base = OTHER; note = 2'-O-methylcytidine
  modified_base 13: mod_base = OTHER; note = 2'-O-methylcytidine
  modified_base 14: mod_base = OTHER; note = 2'-O-methyluridine
  modified_base 15: mod_base = OTHER; note = 2'-deoxyfluoroadenosine
  modified_base 16: mod_base = OTHER; note = 2'-O-methyluridine with a 3'-PO4 blocking group
  source 1..16: mol_type = other DNA
nttttttttttnnnnn

SEQ ID NO: 5527 - DNA, 21 bp, synthetic construct
  misc_feature 1..21: note = Modified oligo substrate or product
  modified_base 16^17: mod_base = OTHER; note = there is a phosphorothioate bond between these bases
  modified_base 17^18: mod_base = OTHER; note = there is a phosphorothioate bond between these bases
  modified_base 1: mod_base = OTHER; note = 5'-6-carboxyfluorescein-thymidine
  modified_base 17: mod_base = OTHER; note = 2'-deoxyfluorocytidine
  modified_base 18: mod_base = OTHER; note = 2'-O-methyladenosine
  modified_base 19: mod_base = OTHER; note = 2'-deoxyfluoroadenosine
  modified_base 20: mod_base = OTHER; note = 2'-deoxyfluoroadenosine
  modified_base 21: mod_base = OTHER; note = 2'-O-methyluridine with a 3'-PO4 blocking group
  source 1..21: mol_type = other DNA
ntttttttttttttttnnnnn

SEQ ID NO: 5528 - DNA, 37 bp, synthetic construct
  misc_feature 1..37: note = Modified oligo substrate or product
  modified_base 1: mod_base = OTHER; note = 5'-6-carboxyfluorescein-thymidine
  modified_base 33: mod_base = OTHER; note = 2'-O-methyladenosine
  modified_base 34: mod_base = OTHER; note = 2'-O-methyladenosine
  modified_base 35: mod_base = OTHER; note = 2'-O-methyladenosine
  modified_base 36: mod_base = OTHER; note = 2'-deoxyfluoroguanosine
  modified_base 37: mod_base = OTHER; note = 2'-O-methyladenosine with a 3'-PO4 blocking group
  source 1..37: mol_type = other DNA
ntttttttttttttttttttttttttttttttnnnnn

SEQ ID NO: 5529 - DNA, 21 bp, synthetic construct
  misc_feature 1..21: note = Modified oligo substrate or product
  modified_base 17^18: mod_base = OTHER; note = there is a phosphorothioate bond between these bases
  modified_base 18^19: mod_base = OTHER; note = there is a phosphorothioate bond between these bases
  modified_base 20^21: mod_base = OTHER; note = there is a phosphorothioate bond between these bases
  modified_base 1: mod_base = OTHER; note = 5'-6-carboxyfluorescein-thymidine
  modified_base 18: mod_base = OTHER; note = 2'-O-methyladenosine
  modified_base 19: mod_base = OTHER; note = 2'-O-methylguanosine
  modified_base 20: mod_base = OTHER; note = 2'-O-methyladenosine
  modified_base 21: mod_base = OTHER; note = 2'-O-methyluridine with a 3'-PO4 blocking group
  source 1..21: mol_type = other DNA
nttttttttttttttttnnnn

SEQ ID NO: 5530 - DNA, 23 bp, synthetic construct
  misc_feature 1..23: note = Modified oligo substrate or product
  modified_base 1: mod_base = OTHER; note = 5'-6-carboxyfluorescein-thymidine
  modified_base 19: mod_base = OTHER; note = 2'-O-methyladenosine
  modified_base 20: mod_base = OTHER; note = 2'-deoxyfluoroguanosine
  modified_base 21: mod_base = OTHER; note = 2'-O-methyladenosine
  modified_base 22: mod_base = OTHER; note = 2'-deoxyfluoroguanosine
  modified_base 23: mod_base = OTHER; note = 2'-O-methyluridine with a 3'-PO4 blocking group
  source 1..23: mol_type = other DNA
ntttttttttttttttttnnnnn

SEQ ID NO: 5531 - DNA, 31 bp, synthetic construct
  misc_feature 1..31: note = Modified oligo substrate or product
  modified_base 1: mod_base = OTHER; note = 5'-6-carboxyfluorescein-thymidine
  modified_base 27: mod_base = OTHER; note = 2'-O-methyluridine
  modified_base 28: mod_base = OTHER; note = 2'-deoxyfluoroguanosine
  modified_base 29: mod_base = OTHER; note = 2'-O-methyluridine
  modified_base 30: mod_base = OTHER; note = 2'-deoxyfluorocytidine
  modified_base 31: mod_base = OTHER; note = 2'-O-methyladenosine with a 3'-PO4 blocking group
  source 1..31: mol_type = other DNA
ntttttttttttttttttttttttttnnnnn

SEQ ID NO: 5532 - DNA, 36 bp, synthetic construct
  misc_feature 1..36: note = Modified oligo substrate or product
  modified_base 1: mod_base = OTHER; note = 5'-6-carboxyfluorescein-thymidine
  modified_base 32: mod_base = OTHER; note = 2'-O-methyluridine
  modified_base 33: mod_base = OTHER; note = 2'-deoxyfluorocytidine
  modified_base 34: mod_base = OTHER; note = 2'-O-methyladenosine
  modified_base 35: mod_base = OTHER; note = 2'-deoxyfluorouridine
  modified_base 36: mod_base = OTHER; note = 2'-O-methyluridine with a 3'-PO4 blocking group
  source 1..36: mol_type = other DNA
nttttttttttttttttttttttttttttttnnnnn

SEQ ID NO: 5533 - DNA, 26 bp, synthetic construct
  misc_feature 1..26: note = Modified oligo substrate or product
  modified_base 1: mod_base = OTHER; note = 5'-6-carboxyfluorescein-thymidine
  modified_base 22: mod_base = OTHER; note = 2'-O-methyluridine
  modified_base 23: mod_base = OTHER; note = 2'-deoxyfluorocytidine
  modified_base 24: mod_base = OTHER; note = 2'-O-methyluridine
  modified_base 25: mod_base = OTHER; note = 2'-deoxyfluorocytidine
  modified_base 26: mod_base = OTHER; note = 2'-O-methyluridine with a 3'-PO4 blocking group
  source 1..26: mol_type = other DNA
nttttttttttttttttttttnnnnn

SEQ ID NO: 5534 - DNA, 51 bp, synthetic construct; identical to SEQ ID NO: 4004
  misc_feature 1..51: note = Modified oligo substrate or product
  modified_base 47^48: mod_base = OTHER; note = there is a phosphorothioate bond between these bases
  modified_base 1: mod_base = OTHER; note = 5'-6-carboxyfluorescein-thymidine
  modified_base 48: mod_base = OTHER; note = 2'-O-methyladenosine
  modified_base 49: mod_base = OTHER; note = 2'-deoxyfluoroadenosine
  modified_base 50: mod_base = OTHER; note = 2'-deoxyfluoroadenosine
  modified_base 51: mod_base = OTHER; note = 2'-O-methyladenosine with a 3'-PO4 blocking group
  source 1..51: mol_type = other DNA

SEQ ID NO: 5535 - DNA, 41 bp, synthetic construct; identical to SEQ ID NO: 4002
  misc_feature 1..41: note = Modified oligo substrate or product
  modified_base 38^39: mod_base = OTHER; note = there is a phosphorothioate bond between these bases
  modified_base 39^40: mod_base = OTHER; note = there is a phosphorothioate bond between these bases
  modified_base 40^41: mod_base = OTHER; note = there is a phosphorothioate bond between these bases
  modified_base 1: mod_base = OTHER; note = 5'-6-carboxyfluorescein-thymidine
  modified_base 38: mod_base = OTHER; note = 2'-O-methylguanosine
  modified_base 39: mod_base = OTHER; note = 2'-O-methyladenosine
  modified_base 40: mod_base = OTHER; note = 2'-O-methylcytidine
  modified_base 41: mod_base = OTHER; note = 2'-O-methyluridine with a 3'-PO4 blocking group
  source 1..41: mol_type = other DNA

SEQ ID NO: 5536 - DNA, 31 bp, synthetic construct; identical to SEQ ID NO: 3999
  misc_feature 1..31: note = Modified oligo substrate or product
  modified_base 1: mod_base = OTHER; note = 5'-6-carboxyfluorescein-thymidine
  modified_base 28: mod_base = OTHER; note = 2'-deoxyfluoroguanosine
  modified_base 29: mod_base = OTHER; note = 2'-O-methyladenosine
  modified_base 30: mod_base = OTHER; note = 2'-deoxyfluorouridine
  modified_base 31: mod_base = OTHER; note = 2'-O-methyladenosine with a 3'-PO4 blocking group
  source 1..31: mol_type = other DNA

SEQ ID NO: 5537 - DNA, 31 bp, synthetic construct; identical to SEQ ID NO: 5531
  misc_feature 1..31: note = Modified oligo substrate or product
  modified_base 1: mod_base = OTHER; note = 5'-6-carboxyfluorescein-thymidine
  modified_base 27: mod_base = OTHER; note = 2'-O-methyluridine
  modified_base 28: mod_base = OTHER; note = 2'-deoxyfluoroguanosine
  modified_base 29: mod_base = OTHER; note = 2'-O-methyluridine
  modified_base 30: mod_base = OTHER; note = 2'-deoxyfluorocytidine
  modified_base 31: mod_base = OTHER; note = 2'-O-methyluridine with a 3'-PO4 blocking group
  source 1..31: mol_type = other DNA

SEQ ID NO: 5538 - DNA, 51 bp, synthetic construct
  misc_feature 1..51: note = Modified oligo substrate or product
  modified_base 1: mod_base = OTHER; note = 5'-6-carboxyfluorescein-thymidine
  modified_base 47: mod_base = OTHER; note = 2'-O-methyladenosine
  modified_base 48: mod_base = OTHER; note = 2'-deoxyfluoroguanosine
  modified_base 49: mod_base = OTHER; note = 2'-O-methyluridine
  modified_base 50: mod_base = OTHER; note = 2'-deoxyfluoroguanosine
  modified_base 51: mod_base = OTHER; note = 2'-O-methyladenosine with a 3'-PO4 blocking group
  source 1..51: mol_type = other DNA
ntttttttttttttttttttttttttttttttttttttttttttttnnnnn

SEQ ID NO: 5539 - DNA, 46 bp, synthetic construct
  misc_feature 1..46: note = Modified oligo substrate or product
  modified_base 1: mod_base = OTHER; note = 5'-6-carboxyfluorescein-thymidine
  modified_base 42: mod_base = OTHER; note = 2'-O-methyladenosine
  modified_base 43: mod_base = OTHER; note = 2'-deoxyfluorouridine
  modified_base 44: mod_base = OTHER; note = 2'-deoxyfluorocytidine
  modified_base 45: mod_base = OTHER; note = 2'-deoxyfluorocytidine
  modified_base 46: mod_base = OTHER; note = 2'-O-methyluridine with a 3'-PO4 blocking group
  source 1..46: mol_type = other DNA
nttttttttttttttttttttttttttttttttttttttttnnnnn

SEQ ID NO: 5540 - DNA, 36 bp, synthetic construct; identical to SEQ ID NO: 5532
  misc_feature 1..36: note = Modified oligo substrate or product
  modified_base 1: mod_base = OTHER; note = 5'-6-carboxyfluorescein-thymidine
  modified_base 32: mod_base = OTHER; note = 2'-O-methyladenosine
  modified_base 33: mod_base = OTHER; note = 2'-O-methyladenosine
  modified_base 34: mod_base = OTHER; note = 2'-O-methyladenosine
  modified_base 35: mod_base = OTHER; note = 2'-deoxyfluoroguanosine
  modified_base 36: mod_base = OTHER; note = 2'-O-methyluridine with a 3'-PO4 blocking group
  source 1..36: mol_type = other DNA

SEQ ID NO: 5541 - DNA, 61 bp, synthetic construct; identical to SEQ ID NO: 4000
  misc_feature 1..61: note = Modified oligo substrate or product
  modified_base 1: mod_base = OTHER; note = 5'-6-carboxyfluorescein-thymidine
  modified_base 58: mod_base = OTHER; note = 2'-O-methyluridine
  modified_base 59: mod_base = OTHER; note = 2'-O-methyluridine
  modified_base 60: mod_base = OTHER; note = 2'-deoxyfluorocytidine
  modified_base 61: mod_base = OTHER; note = 2'-O-methyladenosine with a 3'-PO4 blocking group
  source 1..61: mol_type = other DNA

SEQ ID NO: 5542 - DNA, 46 bp, synthetic construct; identical to SEQ ID NO: 4003
  misc_feature 1..46: note = Modified oligo substrate or product
  modified_base 42^43: mod_base = OTHER; note = there is a phosphorothioate bond between these bases
  modified_base 43^44: mod_base = OTHER; note = there is a phosphorothioate bond between these bases
  modified_base 45^46: mod_base = OTHER; note = there is a phosphorothioate bond between these bases
  modified_base 1: mod_base = OTHER; note = 5'-6-carboxyfluorescein-thymidine
  modified_base 43: mod_base = OTHER; note = 2'-O-methyladenosine
  modified_base 44: mod_base = OTHER; note = 2'-O-methylcytidine
  modified_base 45: mod_base = OTHER; note = 2'-O-methyluridine
  modified_base 46: mod_base = OTHER; note = 2'-O-methyluridine with a 3'-PO4 blocking group
  source 1..46: mol_type = other DNA

SEQ ID NO: 5543 - DNA, 51 bp, synthetic construct; identical to SEQ ID NO: 4004
  misc_feature 1..51: note = Modified oligo substrate or product
  modified_base 47^48: mod_base = OTHER; note = there is a phosphorothioate bond between these bases
  modified_base 1: mod_base = OTHER; note = 5'-6-carboxyfluorescein-thymidine
  modified_base 48: mod_base = OTHER; note = 2'-O-methyladenosine
  modified_base 49: mod_base = OTHER; note = 2'-deoxyfluoroadenosine
  modified_base 50: mod_base = OTHER; note = 2'-deoxyfluoroadenosine
  modified_base 51: mod_base = OTHER; note = 2'-O-methyluridine with a 3'-PO4 blocking group
  source 1..51: mol_type = other DNA

SEQ ID NO: 5544 - DNA, 56 bp, synthetic construct
  misc_feature 1..56: note = Modified oligo substrate or product
  modified_base 52^53: mod_base = OTHER; note = there is a phosphorothioate bond between these bases
  modified_base 53^54: mod_base = OTHER; note = there is a phosphorothioate bond between these bases
  modified_base 1: mod_base = OTHER; note = 5'-6-carboxyfluorescein-thymidine
  modified_base 52: mod_base = OTHER; note = 2'-O-methyluridine
  modified_base 53: mod_base = OTHER; note = 2'-deoxyfluoroadenosine
  modified_base 54: mod_base = OTHER; note = 2'-deoxyfluoroadenosine
  modified_base 55: mod_base = OTHER; note = 2'-deoxyfluoroguanosine
  modified_base 56: mod_base = OTHER; note = 2'-O-methyladenosine with a 3'-PO4 blocking group
  source 1..56: mol_type = other DNA
nttttttttttttttttttttttttttttttttttttttttttttttttttnnnnn

SEQ ID NO: 5545 - DNA, 56 bp, synthetic construct; identical to SEQ ID NO: 5544
  misc_feature 1..56: note = Modified oligo substrate or product
  modified_base 52^53: mod_base = OTHER; note = there is a phosphorothioate bond between these bases
  modified_base 53^54: mod_base = OTHER; note = there is a phosphorothioate bond between these bases
  modified_base 1: mod_base = OTHER; note = 5'-6-carboxyfluorescein-thymidine
  modified_base 52: mod_base = OTHER; note = 2'-O-methyluridine
  modified_base 53: mod_base = OTHER; note = 2'-deoxyfluoroadenosine
  modified_base 54: mod_base = OTHER; note = 2'-deoxyfluoroadenosine
  modified_base 55: mod_base = OTHER; note = 2'-deoxyfluoroguanosine
  modified_base 56: mod_base = OTHER; note = 2'-O-methyluridine with a 3'-PO4 blocking group
  source 1..56: mol_type = other DNA

SEQ ID NO: 5546 - DNA, 51 bp, synthetic construct; identical to SEQ ID NO: 5538
  misc_feature 1..51: note = Modified oligo substrate or product
  modified_base 1: mod_base = OTHER; note = 5'-6-carboxyfluorescein-thymidine
  modified_base 47: mod_base = OTHER; note = 2'-O-methyladenosine
  modified_base 48: mod_base = OTHER; note = 2'-deoxyfluoroguanosine
  modified_base 49: mod_base = OTHER; note = 2'-O-methyluridine
  modified_base 50: mod_base = OTHER; note = 2'-deoxyfluoroguanosine
  modified_base 51: mod_base = OTHER; note = 2'-O-methyluridine with a 3'-PO4 blocking group
  source 1..51: mol_type = other DNA

SEQ ID NO: 5547 - DNA, 15 bp, synthetic construct
  misc_feature 1..15: note = Modified oligo substrate or product
  modified_base 12^13: mod_base = OTHER; note = there is a phosphorothioate bond between these bases
  modified_base 13^14: mod_base = OTHER; note = there is a phosphorothioate bond between these bases
  modified_base 1: mod_base = OTHER; note = 5'-6-carboxyfluorescein-thymidine
  modified_base 12: mod_base = OTHER; note = 2'-O-methylcytidine
  modified_base 13: mod_base = OTHER; note = 2'-O-methyladenosine
  modified_base 14: mod_base = OTHER; note = 2'-O-methylguanosine
  modified_base 15: mod_base = OTHER; note = 2'-O-methylcytidine with a 3'-PO4 blocking group
  source 1..15: mol_type = other DNA
nttttttttttnnnn

SEQ ID NO: 5548 - DNA, 15 bp, synthetic construct
  misc_feature 1..15: note = Modified oligo substrate or product
  modified_base 12^13: mod_base = OTHER; note = there is a phosphorothioate bond between these bases
  modified_base 13^14: mod_base = OTHER; note = there is a phosphorothioate bond between these bases
  modified_base 14^15: mod_base = OTHER; note = there is a phosphorothioate bond between these bases
  modified_base 1: mod_base = OTHER; note = 5'-6-carboxyfluorescein-thymidine
  modified_base 12: mod_base = OTHER; note = 2'-O-methylcytidine
  modified_base 13: mod_base = OTHER; note = 2'-O-methyladenosine
  modified_base 14: mod_base = OTHER; note = 2'-O-methylguanosine
  modified_base 15: mod_base = OTHER; note = 2'-O-methylguanosine with a 3'-PO4 blocking group
  source 1..15: mol_type = other DNA
nttttttttttnnnn

SEQ ID NO: 5549 - DNA, 16 bp, synthetic construct
  misc_feature 1..16: note = Modified oligo substrate or product
  modified_base 13^14: mod_base = OTHER; note = there is a phosphorothioate bond between these bases
  modified_base 14^15: mod_base = OTHER; note = there is a phosphorothioate bond between these bases
  modified_base 15^16: mod_base = OTHER; note = there is a phosphorothioate bond between these bases
  modified_base 1: mod_base = OTHER; note = 5'-6-carboxyfluorescein-thymidine
  modified_base 13: mod_base = OTHER; note = 2'-O-methylcytidine
  modified_base 14: mod_base = OTHER; note = 2'-O-methyladenosine
  modified_base 15: mod_base = OTHER; note = 2'-O-methylguanosine
  modified_base 16: mod_base = OTHER; note = 2'-O-methylguanosine with a 3'-PO4 blocking group
  source 1..16: mol_type = other DNA
ntttttttttttnnnn

SEQ ID NO: 5550 - DNA, 61 bp, synthetic construct; identical to SEQ ID NO: 4000
  misc_feature 1..61: note = Modified oligo substrate or product
  modified_base 1: mod_base = OTHER; note = 5'-6-carboxyfluorescein-thymidine
  modified_base 58: mod_base = OTHER; note = 2'-O-methyluridine
  modified_base 59: mod_base = OTHER; note = 2'-O-methyluridine
  modified_base 60: mod_base = OTHER; note = 2'-deoxyfluorocytidine
  modified_base 61: mod_base = OTHER; note = 2'-O-methylcytidine with a 3'-PO4 blocking group
  source 1..61: mol_type = other DNA

SEQ ID NO: 5551 - DNA, 61 bp, synthetic construct; identical to SEQ ID NO: 4000
  misc_feature 1..61: note = Modified oligo substrate or product
  modified_base 60^61: mod_base = OTHER; note = there is a phosphorothioate bond between these bases
  modified_base 1: mod_base = OTHER; note = 5'-6-carboxyfluorescein-thymidine
  modified_base 58: mod_base = OTHER; note = 2'-O-methyluridine
  modified_base 59: mod_base = OTHER; note = 2'-O-methyluridine
  modified_base 60: mod_base = OTHER; note = 2'-deoxyfluorocytidine
  modified_base 61: mod_base = OTHER; note = 2'-O-methylguanosine with a 3'-PO4 blocking group
  source 1..61: mol_type = other DNA

SEQ ID NO: 5552 - DNA, 21 bp, synthetic construct
  misc_feature 1..21: note = Modified oligo substrate or product
  modified_base 17^18: mod_base = OTHER; note = there is a phosphorothioate bond between these bases
  modified_base 18^19: mod_base = OTHER; note = there is a phosphorothioate bond between these bases
  modified_base 1: mod_base = OTHER; note = 5'-6-carboxyfluorescein-thymidine
  modified_base 18: mod_base = OTHER; note = 2'-O-methyladenosine
  modified_base 19: mod_base = OTHER; note = 2'-O-methylguanosine
  modified_base 20: mod_base = OTHER; note = 2'-O-methyladenosine
  modified_base 21: mod_base = OTHER; note = 2'-O-methylcytidine with a 3'-PO4 blocking group
  source 1..21: mol_type = other DNA
nttttttttttttttttnnnn

SEQ ID NO: 5553 - DNA, 21 bp, synthetic construct
  misc_feature 1..21: note = Modified oligo substrate or product
  modified_base 17^18: mod_base = OTHER; note = there is a phosphorothioate bond between these bases
  modified_base 18^19: mod_base = OTHER; note = there is a phosphorothioate bond between these bases
  modified_base 20^21: mod_base = OTHER; note = there is a phosphorothioate bond between these bases
  modified_base 1: mod_base = OTHER; note = 5'-6-carboxyfluorescein-thymidine
  modified_base 18: mod_base = OTHER; note = 2'-O-methyladenosine
  modified_base 19: mod_base = OTHER; note = 2'-O-methylguanosine
  modified_base 20: mod_base = OTHER; note = 2'-O-methyladenosine
  modified_base 21: mod_base = OTHER; note = 2'-O-methylguanosine with a 3'-PO4 blocking group
  source 1..21: mol_type = other DNA
nttttttttttttttttnnnn

SEQ ID NO: 5554 - DNA, 26 bp, synthetic construct
  misc_feature 1..26: note = Modified oligo substrate or product
  modified_base 22^23: mod_base = OTHER; note = there is a phosphorothioate bond between these bases
  modified_base 1: mod_base = OTHER; note = 5'-6-carboxyfluorescein-thymidine
  modified_base 23: mod_base = OTHER; note = 2'-O-methylguanosine
  modified_base 24: mod_base = OTHER; note = 2'-O-methyladenosine
  modified_base 25: mod_base = OTHER; note = 2'-O-methyladenosine
  modified_base 26: mod_base = OTHER; note = 2'-O-methylcytidine with a 3'-PO4 blocking group
  source 1..26: mol_type = other DNA
ntttttttttttttttttttttnnnn

SEQ ID NO: 5555 - DNA, 26 bp, synthetic construct
  misc_feature 1..26: note = Modified oligo substrate or product
  modified_base 22^23: mod_base = OTHER; note = there is a phosphorothioate bond between these bases
  modified_base 25^26: mod_base = OTHER; note = there is a phosphorothioate bond between these bases
  modified_base 1: mod_base = OTHER; note = 5'-6-carboxyfluorescein-thymidine
  modified_base 23: mod_base = OTHER; note = 2'-O-methylguanosine
  modified_base 24: mod_base = OTHER; note = 2'-O-methyladenosine
  modified_base 25: mod_base = OTHER; note = 2'-O-methyladenosine
  modified_base 26: mod_base = OTHER; note = 2'-O-methylguanosine with a 3'-PO4 blocking group
  source 1..26: mol_type = other DNA
ntttttttttttttttttttttnnnn

SEQ ID NO: 5556 - DNA, 31 bp, synthetic construct; identical to SEQ ID NO: 3999
  misc_feature 1..31: note = Modified oligo substrate or product
  modified_base 1: mod_base = OTHER; note = 5'-6-carboxyfluorescein-thymidine
  modified_base 28: mod_base = OTHER; note = 2'-O-methyladenosine
  modified_base 29: mod_base = OTHER; note = 2'-O-methyladenosine
  modified_base 30: mod_base = OTHER; note = 2'-O-methyladenosine
  modified_base 31: mod_base = OTHER; note = 2'-O-methylcytidine with a 3'-PO4 blocking group
  source 1..31: mol_type = other DNA

SEQ ID NO: 5557 - DNA, 31 bp, synthetic construct; identical to SEQ ID NO: 3999
  misc_feature 1..31: note = Modified oligo substrate or product
  modified_base 30^31: mod_base = OTHER; note = there is a phosphorothioate bond between these bases
  modified_base 1: mod_base = OTHER; note = 5'-6-carboxyfluorescein-thymidine
  modified_base 28: mod_base = OTHER; note = 2'-O-methyladenosine
  modified_base 29: mod_base = OTHER; note = 2'-O-methyladenosine
  modified_base 30: mod_base = OTHER; note = 2'-O-methyladenosine
  modified_base 31: mod_base = OTHER; note = 2'-O-methylguanosine with a 3'-PO4 blocking group
  source 1..31: mol_type = other DNA

SEQ ID NO: 5558 - DNA, 37 bp, synthetic construct; identical to SEQ ID NO: 5528
  misc_feature 1..37: note = Modified oligo substrate or product
  modified_base 1: mod_base = OTHER; note = 5'-6-carboxyfluorescein-thymidine
  modified_base 33: mod_base = OTHER; note = 2'-O-methyladenosine
  modified_base 34: mod_base = OTHER; note = 2'-O-methyladenosine
  modified_base 35: mod_base = OTHER; note = 2'-O-methyladenosine
  modified_base 36: mod_base = OTHER; note = 2'-deoxyfluoroguanosine
  modified_base 37: mod_base = OTHER; note = 2'-O-methylcytidine with a 3'-PO4 blocking group
  source 1..37: mol_type = other DNA

SEQ ID NO: 5559 - DNA, 37 bp, synthetic construct; identical to SEQ ID NO: 5528
  misc_feature 1..37: note = Modified oligo substrate or product
  modified_base 36^37: mod_base = OTHER; note = there is a phosphorothioate bond between these bases
  modified_base 1: mod_base = OTHER; note = 5'-6-carboxyfluorescein-thymidine
  modified_base 33: mod_base = OTHER; note = 2'-O-methyladenosine
  modified_base 34: mod_base = OTHER; note = 2'-O-methyladenosine
  modified_base 35: mod_base = OTHER; note = 2'-O-methyladenosine
  modified_base 36: mod_base = OTHER; note = 2'-deoxyfluoroguanosine
  modified_base 37: mod_base = OTHER; note = 2'-O-methylguanosine with a 3'-PO4 blocking group
  source 1..37: mol_type = other DNA

SEQ ID NO: 5560 - DNA, 41 bp, synthetic construct; identical to SEQ ID NO: 4002
  misc_feature 1..41: note = Modified oligo substrate or product
  modified_base 38^39: mod_base = OTHER; note = there is a phosphorothioate bond between these bases
  modified_base 39^40: mod_base = OTHER; note = there is a phosphorothioate bond between these bases
  modified_base 1: mod_base = OTHER; note = 5'-6-carboxyfluorescein-thymidine
  modified_base 38: mod_base = OTHER; note = 2'-O-methylguanosine
  modified_base 39: mod_base = OTHER; note = 2'-O-methyladenosine
  modified_base 40: mod_base = OTHER; note = 2'-O-methylcytidine
  modified_base 41: mod_base = OTHER; note = 2'-O-methylcytidine with a 3'-PO4 blocking group
  source 1..41: mol_type = other DNA

SEQ ID NO: 5561 - DNA, 41 bp, synthetic construct; identical to SEQ ID NO: 4002
  misc_feature 1..41: note = Modified oligo substrate or product
  modified_base 38^39: mod_base = OTHER; note = there is a phosphorothioate bond between these bases
  modified_base 39^40: mod_base = OTHER; note = there is a phosphorothioate bond between these bases
  modified_base 40^41: mod_base = OTHER; note = there is a phosphorothioate bond between these bases
  modified_base 1: mod_base = OTHER; note = 5'-6-carboxyfluorescein-thymidine
  modified_base 38: mod_base = OTHER; note = 2'-O-methylguanosine
  modified_base 39: mod_base = OTHER; note = 2'-O-methyladenosine
  modified_base 40: mod_base = OTHER; note = 2'-O-methylcytidine
  modified_base 41: mod_base = OTHER; note = 2'-O-methylguanosine with a 3'-PO4 blocking group
  source 1..41: mol_type = other DNA

SEQ ID NO: 5562 - DNA, 46 bp, synthetic construct; identical to SEQ ID NO: 4003
  misc_feature 1..46: note = Modified oligo substrate or product
  modified_base 42^43: mod_base = OTHER; note = there is a phosphorothioate bond between these bases
  modified_base 43^44: mod_base = OTHER; note = there is a phosphorothioate bond between these bases
  modified_base 1: mod_base = OTHER; note = 5'-6-carboxyfluorescein-thymidine
  modified_base 43: mod_base = OTHER; note = 2'-O-methyladenosine
  modified_base 44: mod_base = OTHER; note = 2'-O-methylcytidine
  modified_base 45: mod_base = OTHER; note = 2'-O-methyluridine
  modified_base 46: mod_base = OTHER; note = 2'-O-methylcytidine with a 3'-PO4 blocking group
  source 1..46: mol_type = other DNA

SEQ ID NO: 5563 - DNA, 46 bp, synthetic construct; identical to SEQ ID NO: 4003
  misc_feature 1..46: note = Modified oligo substrate or product
  modified_base 42^43: mod_base = OTHER; note = there is a phosphorothioate bond between these bases
  modified_base 43^44: mod_base = OTHER; note = there is a phosphorothioate bond between these bases
  modified_base 45^46: mod_base = OTHER; note = there is a phosphorothioate bond between these bases
  modified_base 1: mod_base = OTHER; note = 5'-6-carboxyfluorescein-thymidine
  modified_base 43: mod_base = OTHER; note = 2'-O-methyladenosine
  modified_base 44: mod_base = OTHER; note = 2'-O-methylcytidine
  modified_base 45: mod_base = OTHER; note = 2'-O-methyluridine
  modified_base 46: mod_base = OTHER; note = 2'-O-methylguanosine with a 3'-PO4 blocking group
  source 1..46: mol_type = other DNA

SEQ ID NO: 5564 - DNA, 51 bp, synthetic construct; identical to SEQ ID NO: 4004
  misc_feature 1..51: note = Modified oligo substrate or product
  modified_base 47^48: mod_base = OTHER; note = there is a phosphorothioate bond between these bases
  modified_base 1: mod_base = OTHER; note = 5'-6-carboxyfluorescein-thymidine
  modified_base 48: mod_base = OTHER; note = 2'-O-methylcytidine
  modified_base 49: mod_base = OTHER; note = 2'-O-methyluridine
  modified_base 50: mod_base = OTHER; note = 2'-O-methyluridine
  modified_base 51: mod_base = OTHER; note = 2'-O-methylcytidine with a 3'-PO4 blocking group
  source 1..51: mol_type = other DNA

SEQ ID NO: 5565 - DNA, 51 bp, synthetic construct; identical to SEQ ID NO: 4004
  misc_feature 1..51: note = Modified oligo substrate or product
  modified_base 47^48: mod_base = OTHER; note = there is a phosphorothioate bond between these bases
  modified_base 50^51: mod_base = OTHER; note = there is a phosphorothioate bond between these bases
  modified_base 1: mod_base = OTHER; note = 5'-6-carboxyfluorescein-thymidine
  modified_base 48: mod_base = OTHER; note = 2'-O-methylcytidine
  modified_base 49: mod_base = OTHER; note = 2'-O-methyluridine
  modified_base 50: mod_base = OTHER; note = 2'-O-methyluridine
  modified_base 51: mod_base = OTHER; note = 2'-O-methylguanosine with a 3'-PO4 blocking group
  source 1..51: mol_type = other DNA

SEQ ID NO: 5566 - DNA, 56 bp, synthetic construct; identical to SEQ ID NO: 4005
  misc_feature 1..56: note = Modified oligo substrate or product
  modified_base 1: mod_base = OTHER; note = 5'-6-carboxyfluorescein-thymidine
  modified_base 53: mod_base = OTHER; note = 2'-O-methyluridine
  modified_base 54: mod_base = OTHER; note = 2'-O-methyluridine
  modified_base 55: mod_base = OTHER; note = 2'-O-methyluridine
  modified_base 56: mod_base = OTHER; note = 2'-O-methylcytidine with a 3'-PO4 blocking group
  source 1..56: mol_type = other DNA

SEQ ID NO: 5567 - DNA, 56 bp, synthetic construct; identical to SEQ ID NO: 4005
  misc_feature 1..56: note = Modified oligo substrate or product
  modified_base 55^56: mod_base = OTHER; note = there is a phosphorothioate bond between these bases
  modified_base 1: mod_base = OTHER; note = 5'-6-carboxyfluorescein-thymidine
  modified_base 53: mod_base = OTHER; note = 2'-O-methyluridine
  modified_base 54: mod_base = OTHER; note = 2'-O-methyluridine
  modified_base 55: mod_base = OTHER; note = 2'-O-methyluridine
  modified_base 56: mod_base = OTHER; note = 2'-O-methylguanosine with a 3'-PO4 blocking group
  source 1..56: mol_type = other DNA

SEQ ID NO: 5568 - DNA, 36 bp, synthetic construct; identical to SEQ ID NO: 5532
  misc_feature 1..36: note = Modified oligo substrate or product
  modified_base 1: mod_base = OTHER; note = 5'-6-carboxyfluorescein-thymidine
  modified_base 32: mod_base = OTHER; note = 2'-O-methyladenosine
  modified_base 33: mod_base = OTHER; note = 2'-O-methyladenosine
  modified_base 34: mod_base = OTHER; note = 2'-O-methyladenosine
  modified_base 35: mod_base = OTHER; note = 2'-deoxyfluoroguanosine
  modified_base 36: mod_base = OTHER; note = 2'-O-methyladenosine with a 3'-PO4 blocking group
  source 1..36: mol_type = other DNA

SEQ ID NO: 5569 - DNA, 21 bp, synthetic construct
  misc_feature 1..21: note = Modified oligo substrate or product
  modified_base 17^18: mod_base = OTHER; note = there is a phosphorothioate bond between these bases
  modified_base 18^19: mod_base = OTHER; note = there is a phosphorothioate bond between these bases
  modified_base 1: mod_base = OTHER; note = 5'-6-carboxyfluorescein-thymidine
  modified_base 17: mod_base = OTHER; note = 2'-O-methylcytidine
  modified_base 18: mod_base = OTHER; note = 2'-O-methyladenosine
  modified_base 19: mod_base = OTHER; note = 2'-O-methylguanosine
  modified_base 20: mod_base = OTHER; note = 2'-O-methyladenosine
  modified_base 21: mod_base = OTHER; note = 2'-O-methyladenosine with a 3'-PO4 blocking group
  source 1..21: mol_type = other DNA
ntttttttttttttttnnnnn

SEQ ID NO: 5570 - DNA, 16 bp, synthetic construct
  misc_feature 1..16: note = Modified oligo substrate or product
  modified_base 13^14: mod_base = OTHER; note = there is a phosphorothioate bond between these bases
  modified_base 14^15: mod_base = OTHER; note = there is a phosphorothioate bond between these bases
  modified_base 1: mod_base = OTHER; note = 5'-6-carboxyfluorescein-thymidine
  modified_base 13: mod_base = OTHER; note = 2'-O-methylcytidine
  modified_base 14: mod_base = OTHER; note = 2'-O-methyladenosine
  modified_base 15: mod_base = OTHER; note = 2'-O-methylguanosine
  modified_base 16: mod_base = OTHER; note = 2'-O-methyladenosine with a 3'-PO4 blocking group
  source 1..16: mol_type = other DNA
nttttttttttannnn

SEQ ID NO: 5571 - DNA, 26 bp, synthetic construct
  misc_feature 1..26: note = Modified oligo substrate or product
  modified_base 21^22: mod_base = OTHER; note = there is a phosphorothioate bond between these bases
  modified_base 22^23: mod_base = OTHER; note = there is a phosphorothioate bond between these bases
  modified_base 1: mod_base = OTHER; note = 5'-6-carboxyfluorescein-thymidine
  modified_base 22: mod_base = OTHER; note = 2'-O-methyladenosine
  modified_base 23: mod_base = OTHER; note = 2'-O-methylguanosine
  modified_base 24: mod_base = OTHER; note = 2'-O-methyladenosine
  modified_base 25: mod_base = OTHER; note = 2'-O-methyladenosine
  modified_base 26: mod_base = OTHER; note = 2'-O-methyladenosine with a 3'-PO4 blocking group
  source 1..26: mol_type = other DNA
nttttttttttttttttttttnnnnn

SEQ ID NO: 5572 - DNA, 31 bp, synthetic construct; identical to SEQ ID NO: 5531
  misc_feature 1..31: note = Modified oligo substrate or product
  modified_base 26^27: mod_base = OTHER; note = there is a phosphorothioate bond between these bases
  modified_base 1: mod_base = OTHER; note = 5'-6-carboxyfluorescein-thymidine
  modified_base 27: mod_base = OTHER; note = 2'-O-methylguanosine
  modified_base 28: mod_base = OTHER; note = 2'-O-methyladenosine
  modified_base 29: mod_base = OTHER; note = 2'-O-methyladenosine
  modified_base 30: mod_base = OTHER; note = 2'-O-methyladenosine
  modified_base 31: mod_base = OTHER; note = 2'-O-methyladenosine with a 3'-PO4 blocking group
  source 1..31: mol_type = other DNA

SEQ ID NO: 5573 - DNA, 41 bp, synthetic construct
  misc_feature 1..41: note = Modified oligo substrate or product
  modified_base 1: mod_base = OTHER; note = 5'-6-carboxyfluorescein-thymidine
  modified_base 37: mod_base = OTHER; note = 2'-O-methyladenosine
  modified_base 38: mod_base = OTHER; note = 2'-O-methyladenosine
  modified_base 39: mod_base = OTHER; note = 2'-deoxyfluoroguanosine
  modified_base 40: mod_base = OTHER; note = 2'-O-methyladenosine
  modified_base 41: mod_base = OTHER; note = 2'-O-methyladenosine with a 3'-PO4 blocking group
  source 1..41: mol_type = other DNA
ntttttttttttttttttttttttttttttttttttnnnnn

SEQ ID NO: 5574 - DNA, 46 bp, synthetic construct; identical to SEQ ID NO: 5539
  misc_feature 1..46: note = Modified oligo substrate or product
  modified_base 1: mod_base = OTHER; note = 5'-6-carboxyfluorescein-thymidine
  modified_base 42: mod_base = OTHER; note = 2'-deoxyfluoroguanosine
  modified_base 43: mod_base = OTHER; note = 2'-O-methyladenosine
  modified_base 44: mod_base = OTHER; note = 2'-deoxyfluoroguanosine
  modified_base 45: mod_base = OTHER; note = 2'-O-methyluridine
  modified_base 46: mod_base = OTHER; note = 2'-O-methyladenosine with a 3'-PO4 blocking group
  source 1..46: mol_type = other DNA

SEQ ID NO: 5575 - DNA, 56 bp, synthetic construct; identical to SEQ ID NO: 5544
  misc_feature 1..56: note = Modified oligo substrate or product
  modified_base 1: mod_base = OTHER; note = 5'-6-carboxyfluorescein-thymidine
  modified_base 52: mod_base = OTHER; note = 2'-deoxyfluoroguanosine
  modified_base 53: mod_base = OTHER; note = 2'-O-methyluridine
  modified_base 54: mod_base = OTHER; note = 2'-deoxyfluoroguanosine
  modified_base 55: mod_base = OTHER; note = 2'-O-methyluridine
  modified_base 56: mod_base = OTHER; note = 2'-O-methyluridine with a 3'-PO4 blocking group
  source 1..56: mol_type = other DNA

SEQ ID NO: 5576 - DNA, 61 bp, synthetic construct
  misc_feature 1..61: note = Modified oligo substrate or product
  modified_base 1: mod_base = OTHER; note = 5'-6-carboxyfluorescein-thymidine
  modified_base 57: mod_base = OTHER; note = 2'-deoxyfluoroguanosine
  modified_base 58: mod_base = OTHER; note = 2'-O-methyluridine
  modified_base 59: mod_base = OTHER; note = 2'-deoxyfluorocytidine
  modified_base 60: mod_base = OTHER; note = 2'-O-methyluridine
  modified_base 61: mod_base = OTHER; note = 2'-O-methyluridine with a 3'-PO4 blocking group
  source 1..61: mol_type = other DNA
ntttttttttttttttttttttttttttttttttttttttttttttttttttttttnnnnn

SEQ ID NO: 5577 - DNA, 21 bp, synthetic construct
  misc_feature 1..21: note = Modified oligo substrate or product
  modified_base 1: mod_base = OTHER; note = 5'-6-carboxyfluorescein-thymidine
  modified_base 17: mod_base = OTHER; note = 2'-O-methyladenosine
  modified_base 18: mod_base = OTHER; note = 2'-deoxyfluoroguanosine
  modified_base 19: mod_base = OTHER; note = 2'-O-methyladenosine
  modified_base 20: mod_base = OTHER; note = 2'-deoxyfluoroguanosine
  modified_base 21: mod_base = OTHER; note = 2'-O-methyluridine with a 3'-PO4 blocking group
  source 1..21: mol_type = other DNA
ntttttttttttttttnnnnn

SEQ ID NO: 5578 - DNA, 31 bp, synthetic construct; identical to SEQ ID NO: 5531
  misc_feature 1..31: note = Modified oligo substrate or product
  modified_base 1: mod_base = OTHER; note = 5'-6-carboxyfluorescein-thymidine
  modified_base 27: mod_base = OTHER; note = 2'-O-methyluridine
  modified_base 28: mod_base = OTHER; note = 2'-deoxyfluoroguanosine
  modified_base 29: mod_base = OTHER; note = 2'-O-methyluridine
  modified_base 30: mod_base = OTHER; note = 2'-deoxyfluorocytidine
  modified_base 31: mod_base = OTHER; note = 2'-O-methyluridine with a 3'-PO4 blocking group
  source 1..31: mol_type = other DNA

SEQ ID NO: 5579 - DNA, 36 bp, synthetic construct; identical to SEQ ID NO: 5532
  misc_feature 1..36: note = Modified oligo substrate or product
  modified_base 1: mod_base = OTHER; note = 5'-6-carboxyfluorescein-thymidine
  modified_base 32: mod_base = OTHER; note = 2'-O-methyluridine
  modified_base 33: mod_base = OTHER; note = 2'-deoxyfluorocytidine
  modified_base 34: mod_base = OTHER; note = 2'-O-methyladenosine
  modified_base 35: mod_base = OTHER; note = 2'-O-methyluridine
  modified_base 36: mod_base = OTHER; note = 2'-O-methyluridine with a 3'-PO4 blocking group
  source 1..36: mol_type = other DNA

SEQ ID NO: 5580 - DNA, 41 bp, synthetic construct; identical to SEQ ID NO: 5573
  misc_feature 1..41: note = Modified oligo substrate or product
  modified_base 1: mod_base = OTHER; note = 5'-6-carboxyfluorescein-thymidine
  modified_base 37: mod_base = OTHER; note = 2'-deoxyfluorocytidine
  modified_base 38: mod_base = OTHER; note = 2'-O-methyladenosine
  modified_base 39: mod_base = OTHER; note = 2'-O-methyluridine
  modified_base 40: mod_base = OTHER; note = 2'-O-methylcytidine
  modified_base 41: mod_base = OTHER; note = 2'-O-methyluridine with a 3'-PO4 blocking group
  source 1..41: mol_type = other DNA

SEQ ID NO: 5581 - DNA, 46 bp, synthetic construct; identical to SEQ ID NO: 5539
  misc_feature 1..46: note = Modified oligo substrate or product
  modified_base 1: mod_base = OTHER; note = 5'-6-carboxyfluorescein-thymidine
  modified_base 42: mod_base = OTHER; note = 2'-O-methyladenosine
  modified_base 43: mod_base = OTHER; note = 2'-O-methyluridine
  modified_base 44: mod_base = OTHER; note = 2'-O-methylcytidine
  modified_base 45: mod_base = OTHER; note = 2'-O-methyluridine
  modified_base 46: mod_base = OTHER; note = 2'-deoxyfluoroadenosine with a 3'-PO4 blocking group
  source 1..46: mol_type = other DNA

SEQ ID NO: 5582 - DNA, 51 bp, synthetic construct; identical to SEQ ID NO: 5538
  misc_feature 1..51: note = Modified oligo substrate or product
  modified_base 1: mod_base = OTHER; note = 5'-6-carboxyfluorescein-thymidine
  modified_base 47: mod_base = OTHER; note = 2'-O-methyluridine
  modified_base 48: mod_base = OTHER; note = 2'-O-methylcytidine
  modified_base 49: mod_base = OTHER; note = 2'-O-methyluridine
  modified_base 50: mod_base = OTHER; note = 2'-O-methyluridine
  modified_base 51: mod_base = OTHER; note = 2'-deoxyfluoroadenosine with a 3'-PO4 blocking group
  source 1..51: mol_type = other DNA

SEQ ID NO: 5583 - DNA, 56 bp, synthetic construct; identical to SEQ ID NO: 5544
  misc_feature 1..56: note = Modified oligo substrate or product
  modified_base 1: mod_base = OTHER; note = 5'-6-carboxyfluorescein-thymidine
  modified_base 52: mod_base = OTHER; note = 2'-O-methylcytidine
  modified_base 53: mod_base = OTHER; note = 2'-O-methyluridine
  modified_base 54: mod_base = OTHER; note = 2'-O-methyluridine
  modified_base 55: mod_base = OTHER; note = 2'-O-methyladenosine
  modified_base 56: mod_base = OTHER; note = 2'-deoxyfluoroadenosine with a 3'-PO4 blocking group
  source 1..56: mol_type = other DNA

SEQ ID NO: 5584 - DNA, 16 bp, synthetic construct
  misc_feature 1..16: note = Modified oligo substrate or product
  modified_base 1: mod_base = OTHER; note = 5'-6-carboxyfluorescein-thymidine
  modified_base 13: mod_base = OTHER; note = 2'-O-methyladenosine
  modified_base 14: mod_base = OTHER; note = 2'-O-methylguanosine
  modified_base 15: mod_base = OTHER; note = 2'-O-(2-methoxyethyl)cytidine
  modified_base 16: mod_base = OTHER; note = 2'-deoxyfluoroadenosine with a 3'-PO4 blocking group
  source 1..16: mol_type = other DNA
ntttttttttttnnnn

SEQ ID NO: 5585 - DNA, 31 bp, synthetic construct; identical to SEQ ID NO: 5531
  misc_feature 1..31: note = Modified oligo substrate or product
  modified_base 29^30: mod_base = OTHER; note = there is a phosphorothioate bond between these bases
  modified_base 1: mod_base = OTHER; note = 5'-6-carboxyfluorescein-thymidine
  modified_base 27: mod_base = OTHER; note = 2'-O-methylcytidine
  modified_base 28: mod_base = OTHER; note = 2'-O-methylcytidine
  modified_base 29: mod_base = OTHER; note = 2'-O-methyluridine
  modified_base 30: mod_base = OTHER; note = 2'-O-methyluridine
  modified_base 31: mod_base = OTHER; note = 2'-O-methylcytidine with a 3'-PO4 blocking group
  source 1..31: mol_type = other DNA

SEQ ID NO: 5586 - DNA, 31 bp, synthetic construct; identical to SEQ ID NO: 5531
  misc_feature 1..31: note = Modified oligo substrate or product
  modified_base 29^30: mod_base = OTHER; note = there is a phosphorothioate bond between these bases
  modified_base 30^31: mod_base = OTHER; note = there is a phosphorothioate bond between these bases
  modified_base 1: mod_base = OTHER; note = 5'-6-carboxyfluorescein-thymidine
  modified_base 27: mod_base = OTHER; note = 2'-O-methylcytidine
  modified_base 28: mod_base = OTHER; note = 2'-O-methylcytidine
  modified_base 29: mod_base = OTHER; note = 2'-O-methyluridine
  modified_base 30: mod_base = OTHER; note = 2'-O-methyluridine
  modified_base 31: mod_base = OTHER; note = 2'-O-methylguanosine with a 3'-PO4 blocking group
  source 1..31: mol_type = other DNA

SEQ ID NO: 5587 - DNA, 31 bp, synthetic construct; identical to SEQ ID NO: 5531
  misc_feature 1..31: note = Modified oligo substrate or product
  modified_base 29^30: mod_base = OTHER; note = there is a phosphorothioate bond between these bases
  modified_base 30^31: mod_base = OTHER; note = there is a phosphorothioate bond between these bases
  modified_base 1: mod_base = OTHER; note = 5'-6-carboxyfluorescein-thymidine
  modified_base 27: mod_base = OTHER; note = 2'-O-methylcytidine
  modified_base 28: mod_base = OTHER; note = 2'-O-methylcytidine
  modified_base 29: mod_base = OTHER; note = 2'-O-methyluridine
  modified_base 30: mod_base = OTHER; note = 2'-O-methyluridine
  modified_base 31: mod_base = OTHER; note = 2'-O-methyluridine with a 3'-PO4 blocking group
  source 1..31: mol_type = other DNA

SEQ ID NO: 5588 - DNA, 31 bp, synthetic construct; identical to SEQ ID NO: 5531
  misc_feature 1..31: note = Modified oligo substrate or product
  modified_base 29^30: mod_base = OTHER; note = there is a phosphorothioate bond between these bases
  modified_base 1: mod_base = OTHER; note = 5'-6-carboxyfluorescein-thymidine
  modified_base 27: mod_base = OTHER; note = 2'-O-methylcytidine
  modified_base 28: mod_base = OTHER; note = 2'-O-methylcytidine
  modified_base 29: mod_base = OTHER; note = 2'-O-methyluridine
  modified_base 30: mod_base = OTHER; note = 2'-O-methyluridine
  modified_base 31: mod_base = OTHER; note = 2'-deoxyfluoroguanosine with a 3'-PO4 blocking group
  source 1..31: mol_type = other DNA

SEQ ID NO: 5589 - DNA, 31 bp, synthetic construct; identical to SEQ ID NO: 5531
  misc_feature 1..31: note = Modified oligo substrate or product
  modified_base 29^30: mod_base = OTHER; note = there is a phosphorothioate bond between these bases
  modified_base 1: mod_base = OTHER; note = 5'-6-carboxyfluorescein-thymidine
  modified_base 27: mod_base = OTHER; note = 2'-O-methylcytidine
  modified_base 28: mod_base = OTHER; note = 2'-O-methylcytidine
  modified_base 29: mod_base = OTHER; note = 2'-O-methyluridine
  modified_base 30: mod_base = OTHER; note = 2'-O-methyluridine
  modified_base 31: mod_base = OTHER; note = 2'-O-methyluridine with a 3'-PO4 blocking group
  source 1..31: mol_type = other DNA

SEQ ID NO: 5590 - DNA, 26 bp, synthetic construct
  misc_feature 1..26: note = Modified oligo substrate or product
  modified_base 21^22: mod_base = OTHER; note = there is a phosphorothioate bond between these bases
  modified_base 22^23: mod_base = OTHER; note = there is a phosphorothioate bond between these bases
  modified_base 1: mod_base = OTHER; note = 5'-6-carboxyfluorescein-thymidine
  modified_base 22: mod_base = OTHER; note = 2'-deoxyfluoroadenosine
  modified_base 23: mod_base = OTHER; note = 2'-deoxyfluoroadenosine
  modified_base 24: mod_base = OTHER; note = 2'-deoxyfluoroguanosine
  modified_base 25: mod_base = OTHER; note = 2'-O-methyladenosine
  modified_base 26: mod_base = OTHER; note = 2'-O-methylcytidine with a 3'-PO4 blocking group
  source 1..26: mol_type = other DNA
nttttttttttttttttttttnnnnn

SEQ ID NO: 5591 - DNA, 26 bp, synthetic construct
  misc_feature 1..26: note = Modified oligo substrate or product
  modified_base 21^22: mod_base = OTHER; note = there is a phosphorothioate bond between these bases
  modified_base 22^23: mod_base = OTHER; note = there is a phosphorothioate bond between these bases
  modified_base 25^26: mod_base = OTHER; note = there is a phosphorothioate bond between these bases
  modified_base 1: mod_base = OTHER; note = 5'-6-carboxyfluorescein-thymidine
  modified_base 22: mod_base = OTHER; note = 2'-deoxyfluoroadenosine
  modified_base 23: mod_base = OTHER; note = 2'-deoxyfluoroadenosine
  modified_base 24: mod_base = OTHER; note = 2'-deoxyfluoroguanosine
  modified_base 25: mod_base = OTHER; note = 2'-O-methyladenosine
  modified_base 26: mod_base = OTHER; note = 2'-O-methylguanosine with a 3'-PO4 blocking group
  source 1..26: mol_type = other DNA
nttttttttttttttttttttnnnnn

SEQ ID NO: 5592 - DNA, 26 bp, synthetic construct
  misc_feature 1..26: note = Modified oligo substrate or product
  modified_base 21^22: mod_base = OTHER; note = there is a phosphorothioate bond between these bases
  modified_base 22^23: mod_base = OTHER; note = there is a phosphorothioate bond between these bases
  modified_base 25^26: mod_base = OTHER; note = there is a phosphorothioate bond between these bases
  modified_base 1: mod_base = OTHER; note = 5'-6-carboxyfluorescein-thymidine
  modified_base 22: mod_base = OTHER; note = 2'-deoxyfluoroadenosine
  modified_base 23: mod_base = OTHER; note = 2'-deoxyfluoroadenosine
  modified_base 24: mod_base = OTHER; note = 2'-deoxyfluoroguanosine
  modified_base 25: mod_base = OTHER; note = 2'-O-methyladenosine
  modified_base 26: mod_base = OTHER; note = 2'-O-methyluridine with a 3'-PO4 blocking group
  source 1..26: mol_type = other DNA
nttttttttttttttttttttnnnnn

SEQ ID NO: 5593 - DNA, 26 bp, synthetic construct
  misc_feature 1..26: note = Modified oligo substrate or product
  modified_base 21^22: mod_base = OTHER; note = there is a phosphorothioate bond between these bases
  modified_base 22^23: mod_base = OTHER; note = there is a phosphorothioate bond between these bases
  modified_base 1: mod_base = OTHER; note = 5'-6-carboxyfluorescein-thymidine
  modified_base 22: mod_base = OTHER; note = 2'-deoxyfluoroadenosine
  modified_base 23: mod_base = OTHER; note = 2'-deoxyfluoroadenosine
  modified_base 24: mod_base = OTHER; note = 2'-deoxyfluoroguanosine
  modified_base 25: mod_base = OTHER; note = 2'-O-methyladenosine
  modified_base 26: mod_base = OTHER; note = 2'-deoxyfluoroguanosine with a 3'-PO4 blocking group
  source 1..26: mol_type = other DNA
nttttttttttttttttttttnnnnn

SEQ ID NO: 5594 - DNA, 26 bp, synthetic construct
  misc_feature 1..26: note = Modified oligo substrate or product
  modified_base 21^22: mod_base = OTHER; note = there is a phosphorothioate bond between these bases
  modified_base 22^23: mod_base = OTHER; note = there is a phosphorothioate bond between these bases
  modified_base 1: mod_base = OTHER; note = 5'-6-carboxyfluorescein-thymidine
  modified_base 22: mod_base = OTHER; note = 2'-deoxyfluoroadenosine
  modified_base 23: mod_base = OTHER; note = 2'-deoxyfluoroadenosine
  modified_base 24: mod_base = OTHER; note = 2'-deoxyfluoroguanosine
  modified_base 25: mod_base = OTHER; note = 2'-O-methyladenosine
  modified_base 26: mod_base = OTHER; note = 2'-O-methyluridine with a 3'-PO4 blocking group
  source 1..26: mol_type = other DNA
nttttttttttttttttttttnnnnn

SEQ ID NO: 5595 - DNA, 19 bp, synthetic construct
  misc_feature 1..19: note = Modified oligo substrate or product
  modified_base 1: mod_base = OTHER; note = 5'-6-carboxyfluorescein-thymidine
  modified_base 16: mod_base = OTHER; note = 2'-O-methylguanosine
  modified_base 17: mod_base = OTHER; note = 2'-O-methyladenosine
  modified_base 18: mod_base = OTHER; note = 2'-O-methylcytidine
  modified_base 19: mod_base = OTHER; note = 2'-deoxyfluorocytidine with a 3'-PO4 blocking group
  source 1..19: mol_type = other DNA
nttttttttttttttnnnn

SEQ ID NO: 5596 - DNA, 19 bp, synthetic construct
  misc_feature 1..19: note = Modified oligo substrate or product
  modified_base 1: mod_base = OTHER; note = 5'-6-carboxyfluorescein-thymidine
  modified_base 16: mod_base = OTHER; note = 2'-O-methylguanosine
  modified_base 17: mod_base = OTHER; note = 2'-O-methyladenosine
  modified_base 18: mod_base = OTHER; note = 2'-O-methylcytidine
  modified_base 19: mod_base = OTHER; note = 2'-deoxyfluorocytidine
  source 1..19: mol_type = other DNA
nttttttttttttttnnnn

SEQ ID NO: 5597 - DNA, 20 bp, synthetic construct
  misc_feature 1..20: note = Modified oligo substrate or product
  modified_base 1: mod_base = OTHER; note = 5'-6-carboxyfluorescein-thymidine
  modified_base 16: mod_base = OTHER; note = 2'-O-methylguanosine
  modified_base 17: mod_base = OTHER; note = 2'-O-methyladenosine
  modified_base 18: mod_base = OTHER; note = 2'-O-methylcytidine
  modified_base 19: mod_base = OTHER; note = 2'-deoxyfluorocytidine
  modified_base 20: mod_base = OTHER; note = 2'-O-methyluridine with a 3'-PO4 blocking group
  source 1..20: mol_type = other DNA
nttttttttttttttnnnnn

SEQ ID NO: 5598 - DNA, 20 bp, synthetic construct
  misc_feature 1..20: note = Modified oligo substrate or product
  modified_base 1: mod_base = OTHER; note = 5'-6-carboxyfluorescein-thymidine
  modified_base 16: mod_base = OTHER; note = 2'-O-methylguanosine
  modified_base 17: mod_base = OTHER; note = 2'-O-methyladenosine
  modified_base 18: mod_base = OTHER; note = 2'-O-methylcytidine
  modified_base 19: mod_base = OTHER; note = 2'-deoxyfluorocytidine
  modified_base 20: mod_base = OTHER; note = 2'-O-methyluridine
  source 1..20: mol_type = other DNA
nttttttttttttttnnnnn

SEQ ID NO: 5599 - DNA, 21 bp, synthetic construct
  misc_feature 1..21: note = Modified oligo substrate or product
  modified_base 1: mod_base = OTHER; note = 5'-6-carboxyfluorescein-thymidine
  modified_base 16: mod_base = OTHER; note = 2'-O-methylguanosine
  modified_base 17: mod_base = OTHER; note = 2'-O-methyladenosine
  modified_base 18: mod_base = OTHER; note = 2'-O-methylcytidine
  modified_base 19: mod_base = OTHER; note = 2'-deoxyfluorocytidine
  modified_base 20: mod_base = OTHER; note = 2'-O-methyluridine
  modified_base 21: mod_base = OTHER; note = 2'-deoxyfluorocytidine with a 3'-PO4 blocking group
  source 1..21: mol_type = other DNA
nttttttttttttttnnnnnn

SEQ ID NO: 5600 - DNA, 21 bp, synthetic construct
  misc_feature 1..21: note = Modified oligo substrate or product
  modified_base 1: mod_base = OTHER; note = 5'-6-carboxyfluorescein-thymidine
  modified_base 16: mod_base = OTHER; note = 2'-O-methylguanosine
  modified_base 17: mod_base = OTHER; note = 2'-O-methyladenosine
  modified_base 18: mod_base = OTHER; note = 2'-O-methylcytidine
  modified_base 19: mod_base = OTHER; note = 2'-deoxyfluorocytidine
  modified_base 20: mod_base = OTHER; note = 2'-O-methyluridine
  modified_base 21: mod_base = OTHER; note = 2'-deoxyfluorocytidine
  source 1..21: mol_type = other DNA
nttttttttttttttnnnnnn

SEQ ID NO: 5601 - DNA, 22 bp, synthetic construct
  misc_feature 1..22: note = Modified oligo substrate or product
  modified_base 1: mod_base = OTHER; note = 5'-6-carboxyfluorescein-thymidine
  modified_base 16: mod_base = OTHER; note = 2'-O-methylguanosine
  modified_base 17: mod_base = OTHER; note = 2'-O-methyladenosine
  modified_base 18: mod_base = OTHER; note = 2'-O-methylcytidine
  modified_base 19: mod_base = OTHER; note = 2'-deoxyfluorocytidine
  modified_base 20: mod_base = OTHER; note = 2'-O-methyluridine
  modified_base 21: mod_base = OTHER; note = 2'-deoxyfluorocytidine
  modified_base 22: mod_base = OTHER; note = 2'-O-methyladenosine with a 3'-PO4 blocking group
  source 1..22: mol_type = other DNA
nttttttttttttttnnnnnnn

SEQ ID NO: 5602 - DNA, 22 bp, synthetic construct
  misc_feature 1..22: note = Modified oligo substrate or product
  modified_base 1: mod_base = OTHER; note = 5'-6-carboxyfluorescein-thymidine
  modified_base 16: mod_base = OTHER; note = 2'-O-methylguanosine
  modified_base 17: mod_base = OTHER; note = 2'-O-methyladenosine
  modified_base 18: mod_base = OTHER; note = 2'-O-methylcytidine
  modified_base 19: mod_base = OTHER; note = 2'-deoxyfluorocytidine
  modified_base 20: mod_base = OTHER; note = 2'-O-methyluridine
  modified_base 21: mod_base = OTHER; note = 2'-deoxyfluorocytidine
  modified_base 22: mod_base = OTHER; note = 2'-O-methyladenosine
  source 1..22: mol_type = other DNA
nttttttttttttttnnnnnnn

SEQ ID NO: 5603 - DNA, 23 bp, synthetic construct
  misc_feature 1..23: note = Modified oligo substrate or product
  modified_base 1: mod_base = OTHER; note = 5'-6-carboxyfluorescein-thymidine
  modified_base 16: mod_base = OTHER; note = 2'-O-methylguanosine
  modified_base 17: mod_base = OTHER; note = 2'-O-methyladenosine
  modified_base 18: mod_base = OTHER; note = 2'-O-methylcytidine
  modified_base 19: mod_base = OTHER; note = 2'-deoxyfluorocytidine
  modified_base 20: mod_base = OTHER; note = 2'-O-methyluridine
  modified_base 21: mod_base = OTHER; note = 2'-deoxyfluorocytidine
  modified_base 22: mod_base = OTHER; note = 2'-O-methyladenosine
  modified_base 23: mod_base = OTHER; note = 2'-O-methyluridine with a 3'-PO4 blocking group
  source 1..23: mol_type = other DNA
nttttttttttttttnnnnnnnn

SEQ ID NO: 5604 - DNA, 23 bp, synthetic construct
  misc_feature 1..23: note = Modified oligo substrate or product
  modified_base 1: mod_base = OTHER; note = 5'-6-carboxyfluorescein-thymidine
  modified_base 16: mod_base = OTHER; note = 2'-O-methylguanosine
  modified_base 17: mod_base = OTHER; note = 2'-O-methyladenosine
  modified_base 18: mod_base = OTHER; note = 2'-O-methylcytidine
  modified_base 19: mod_base = OTHER; note = 2'-deoxyfluorocytidine
  modified_base 20: mod_base = OTHER; note = 2'-O-methyluridine
  modified_base 21: mod_base = OTHER; note = 2'-deoxyfluorocytidine
  modified_base 22: mod_base = OTHER; note = 2'-O-methyladenosine
  modified_base 23: mod_base = OTHER; note = 2'-O-methyluridine
  source 1..23: mol_type = other DNA
nttttttttttttttnnnnnnnn

SEQ ID NO: 5605 - DNA, 19 bp, synthetic construct
  misc_feature 1..19: note = Modified oligo substrate or product
  modified_base 1: mod_base = OTHER; note = 5'-6-carboxyfluorescein-thymidine
  modified_base 16: mod_base = OTHER; note = 2'-O-methylguanosine
  modified_base 17: mod_base = OTHER; note = 2'-O-methyladenosine
  modified_base 18: mod_base = OTHER; note = 2'-O-methylcytidine
  modified_base 19: mod_base = OTHER; note = 2'-O-methylguanosine
  source 1..19: mol_type = other DNA
nttttttttttttttnnnn

SEQ ID NO: 5606 - DNA, 19 bp, synthetic construct
  misc_feature 1..19: note = Modified oligo substrate or product
  modified_base 1: mod_base = OTHER; note = 5'-6-carboxyfluorescein-thymidine
  modified_base 16: mod_base = OTHER; note = 2'-O-methyladenosine
  modified_base 17: mod_base = OTHER; note = 2'-O-methyluridine
  modified_base 18: mod_base = OTHER; note = 2'-deoxyfluoroguanosine
  modified_base 19: mod_base = OTHER; note = 2'-O-methyladenosine
  source 1..19: mol_type = other DNA
nttttttttttttttnnnn

SEQ ID NO: 5607 - DNA, 26 bp, synthetic construct
  misc_feature 1..26: note = Modified oligo substrate or product
  modified_base 1: mod_base = OTHER; note = 5'-6-carboxyfluorescein-thymidine
  modified_base 22: mod_base = OTHER; note = 2'-O-methyluridine
  modified_base 23: mod_base = OTHER; note = 2'-deoxyfluorocytidine
  modified_base 24: mod_base = OTHER; note = 2'-O-methyluridine
  modified_base 25: mod_base = OTHER; note = 2'-deoxyfluorocytidine
  modified_base 26: mod_base = OTHER; note = 2'-O-methyladenosine with a 3'-PO4 blocking group
  source 1..26: mol_type = other DNA
nttttttttttttttttttttnnnnn

SEQ ID NO: 5608 - DNA, 26 bp, synthetic construct
  misc_feature 1..26: note = Modified oligo substrate or product
  modified_base 1: mod_base = OTHER; note = 5'-6-carboxyfluorescein-thymidine
  modified_base 22: mod_base = OTHER; note = 2'-O-methyluridine
  modified_base 23: mod_base = OTHER; note = 2'-deoxyfluorocytidine
  modified_base 24: mod_base = OTHER; note = 2'-O-methyluridine
  modified_base 25: mod_base = OTHER; note = 2'-deoxyfluorocytidine
  modified_base 26: mod_base = OTHER; note = 2'-O-methyladenosine
  source 1..26: mol_type = other DNA
nttttttttttttttttttttnnnnn

SEQ ID NO: 5609 - DNA, 19 bp, synthetic construct
  misc_feature 1..19: note = Modified oligo substrate or product
  modified_base 17^18: mod_base = OTHER; note = there is a phosphorothioate bond between these bases
  modified_base 1: mod_base = OTHER; note = 5'-6-carboxyfluorescein-thymidine
  modified_base 16: mod_base = OTHER; note = 2'-O-methyladenosine
  modified_base 17: mod_base = OTHER; note = 2'-O-methylguanosine
  modified_base 18: mod_base = OTHER; note = 2'-O-methylguanosine
  modified_base 19: mod_base = OTHER; note = 2'-O-methyladenosine with a 3'-PO4 blocking group
  source 1..19: mol_type = other DNA
nttttttttttttttnnnn

SEQ ID NO: 5610 - DNA, 19 bp, synthetic construct
  misc_feature 1..19: note = Modified oligo substrate or product
  modified_base 17^18: mod_base = OTHER; note = there is a phosphorothioate bond between these bases
  modified_base 1: mod_base = OTHER; note = 5'-6-carboxyfluorescein-thymidine
  modified_base 16: mod_base = OTHER; note = 2'-O-methyladenosine
  modified_base 17: mod_base = OTHER; note = 2'-O-methylguanosine
  modified_base 18: mod_base = OTHER; note = 2'-O-methylguanosine
  modified_base 19: mod_base = OTHER; note = 2'-O-methyladenosine
  source 1..19: mol_type = other DNA
nttttttttttttttnnnn

SEQ ID NO: 5611 - DNA, 19 bp, synthetic construct
  misc_feature 1..19: note = Modified oligo substrate or product
  modified_base 17^18: mod_base = OTHER; note = there is a phosphorothioate bond between these bases
  modified_base 16: mod_base = OTHER; note = 2'-O-methyladenosine
  modified_base 17: mod_base = OTHER; note = 2'-O-methylguanosine
  modified_base 18: mod_base = OTHER; note = 2'-O-methylguanosine
  modified_base 19: mod_base = OTHER; note = 2'-O-methyladenosine with a 3'-PO4 blocking group
  source 1..19: mol_type = other DNA
tttttttttttttttnnnn

SEQ ID NO: 5612 - DNA, 19 bp, synthetic construct
  misc_feature 1..19: note = Modified oligo substrate or product
  modified_base 17^18: mod_base = OTHER; note = there is a phosphorothioate bond between these bases
  modified_base 16: mod_base = OTHER; note = 2'-O-methyladenosine
  modified_base 17: mod_base = OTHER; note = 2'-O-methylguanosine
  modified_base 18: mod_base = OTHER; note = 2'-O-methylguanosine
  modified_base 19: mod_base = OTHER; note = 2'-O-methyladenosine
  source 1..19: mol_type = other DNA
tttttttttttttttnnnn

SEQ ID NO: 5613 - DNA, 21 bp, synthetic construct
  misc_feature 1..21: note = Modified oligo substrate or product
  modified_base 1: mod_base = OTHER; note = 5'-6-carboxyfluorescein-thymidine
  modified_base 18: mod_base = OTHER; note = 2'-O-methyladenosine
  modified_base 19: mod_base = OTHER; note = 2'-O-methylcytidine
  modified_base 20: mod_base = OTHER; note = 2'-O-methylcytidine
  modified_base 21: mod_base = OTHER; note = 2'-O-methyladenosine with a 3'-PO4 blocking group
  source 1..21: mol_type = other DNA
nttttttttttttttttnnnn

SEQ ID NO: 5614 - DNA, 21 bp, synthetic construct
  misc_feature 1..21: note = Modified oligo substrate or product
  modified_base 1: mod_base = OTHER; note = 5'-6-carboxyfluorescein-thymidine
  modified_base 18: mod_base = OTHER; note = 2'-O-methyladenosine
  modified_base 19: mod_base = OTHER; note = 2'-O-methylcytidine
  modified_base 20: mod_base = OTHER; note = 2'-O-methylcytidine
  modified_base 21: mod_base = OTHER; note = 2'-O-methyladenosine
  source 1..21: mol_type = other DNA
nttttttttttttttttnnnn

SEQ ID NO: 5615 - DNA, 18 bp, synthetic construct
  misc_feature 1..18: note = Modified oligo substrate or product
  modified_base 16: mod_base = OTHER; note = 2'-O-methyladenosine
  modified_base 17: mod_base = OTHER; note = 2'-O-methyluridine
  modified_base 18: mod_base = OTHER; note = 2'-deoxyfluoroguanosine
  source 1..18: mol_type = other DNA
tttttttttttttttnnn
